United States Patent Application Publication US 2025/0034234 A1 - sequence listing, part 2

SEQ ID NO: 36341 - protein, 18 aa, Homo sapiens
CARDGCGYNYGPCASDIW

SEQ ID NO: 36342 - protein, 17 aa, Homo sapiens
CARVGSTLFARYSFDHW

SEQ ID NO: 36343 - protein, 19 aa, Homo sapiens
CTRDRNFGDPEGETYFESW

SEQ ID NO: 36344 - protein, 18 aa, Homo sapiens
CARSRFGVANFYYYMDVW

SEQ ID NO: 36345 - protein, 16 aa, Homo sapiens
CAKDVDEDNYGLFDHW

SEQ ID NO: 36346 - protein, 18 aa, Homo sapiens
CARGFPRSAAMPVTFDHW

SEQ ID NO: 36347 - protein, 18 aa, Homo sapiens
CAKDSRAYNWNFGWFDPW

SEQ ID NO: 36348 - protein, 15 aa, Homo sapiens
CARIRHSGAYGFDYW

SEQ ID NO: 36349 - protein, 18 aa, Homo sapiens
CARDSSIAIGAVPQFDYW

SEQ ID NO: 36350 - protein, 18 aa, Homo sapiens
CARRARYSADWSYYFDYW

SEQ ID NO: 36351 - protein, 13 aa, Homo sapiens
CGEVLYQRYFEYW

SEQ ID NO: 36352 - protein, 14 aa, Homo sapiens
CARKYSEGVPNDYW

SEQ ID NO: 36353 - protein, 18 aa, Homo sapiens
CVTRFDGSGSFYGAFDTW

SEQ ID NO: 36354 - protein, 16 aa, Homo sapiens
CVSGSGYYYPYYFDYW

SEQ ID NO: 36355 - protein, 17 aa, Homo sapiens
CARDIGYYYESSKIDYW

SEQ ID NO: 36356 - protein, 21 aa, Homo sapiens
CARVFRVLGGVTWSLDAFDIW

SEQ ID NO: 36357 - protein, 15 aa, Homo sapiens
CAGGDILAGYHFDYW

SEQ ID NO: 36358 - protein, 15 aa, Homo sapiens
CTTDPMVRGVIKDYW

SEQ ID NO: 36359 - protein, 18 aa, Homo sapiens
CARVNRHSGGWYQAFDYW

SEQ ID NO: 36360 - protein, 19 aa, Homo sapiens
CARVESSVHLEYYYYMDVW

SEQ ID NO: 36361 - protein, 14 aa, Homo sapiens
CTRGKIVATIGDYW

SEQ ID NO: 36362 - protein, 19 aa, Homo sapiens
CAREGAIEYSSDRDAFDIW

SEQ ID NO: 36363 - protein, 18 aa, Homo sapiens
CARRAGLGSTAKFIFDYW

SEQ ID NO: 36364 - protein, 21 aa, Homo sapiens
CARHKSGLVTRFSFYYYLDVW

SEQ ID NO: 36365 - protein, 13 aa, Homo sapiens
CHQRSNWPPGHTF

SEQ ID NO: 36366 - protein, 19 aa, Homo sapiens
CAKDKSPSSSTTPIGFDHW

SEQ ID NO: 36367 - protein, 24 aa, Homo sapiens
CARHQAPYDNLPTTSWTYNYFDPW

SEQ ID NO: 36368 - protein, 20 aa, Homo sapiens
CARHRTVGSRSSPHDALNIW

SEQ ID NO: 36369 - protein, 14 aa, Homo sapiens
CARESARDGDFDYW

SEQ ID NO: 36370 - protein, 17 aa, Homo sapiens
CVRGGGVGYLFNAFDIW

SEQ ID NO: 36371 - protein, 21 aa, Homo sapiens
CARFASLDYYDSGGYYYVDYW

SEQ ID NO: 36372 - protein, 15 aa, Homo sapiens
CARRGIQPWSLLDYW

SEQ ID NO: 36373 - protein, 20 aa, Homo sapiens
CARGQRGYLYGYGGGFFDTW

SEQ ID NO: 36374 - protein, 15 aa, Homo sapiens
CAREHSSRDTGIDYW

SEQ ID NO: 36375 - protein, 17 aa, Homo sapiens
CARQFYFERSGYVFDYW

SEQ ID NO: 36376 - protein, 22 aa, Homo sapiens
CATDRPSYYYDSSGYLDPFDTW

SEQ ID NO: 36377 - protein, 16 aa, Homo sapiens
CARDQDSERSYWFDPW

SEQ ID NO: 36378 - protein, 26 aa, Homo sapiens
CARAPSRHPSIAVPGTAGYYYYVDVW

SEQ ID NO: 36379 - protein, 21 aa, Homo sapiens
CAREMSEGYCSGGSCYSFDYW

SEQ ID NO: 36380 - protein, 16 aa, Homo sapiens
CARHWEMQLVQVFDFW

SEQ ID NO: 36381 - protein, 22 aa, Homo sapiens
CVRGSPRDGYIEYYYYYFMDAW

SEQ ID NO: 36382 - protein, 17 aa, Homo sapiens
CARGGFPGVYTAGFDDW

SEQ ID NO: 36383 - protein, 13 aa, Homo sapiens
CQSPDRSGTLGVF

SEQ ID NO: 36384 - protein, 21 aa, Homo sapiens
CARLYSTSWLKSPHNNWFDPW

SEQ ID NO: 36385 - protein, 15 aa, Homo sapiens
CAKAQSSEEGAFDMW

SEQ ID NO: 36386 - protein, 20 aa, Homo sapiens
CTRDSYKYSSSYYGNWFDPW

SEQ ID NO: 36387 - protein, 16 aa, Homo sapiens
CARGRGGWYAYYFDYW

SEQ ID NO: 36388 - protein, 16 aa, Homo sapiens
CARPMTTVTSDAFEIW

SEQ ID NO: 36389 - protein, 11 aa, Homo sapiens
CQSYDSTSRMF

SEQ ID NO: 36390 - protein, 15 aa, Homo sapiens
CARDGPTGAIALDYW

SEQ ID NO: 36391 - protein, 20 aa, Homo sapiens
CARDRTYCGGDCLSEPFDIW

SEQ ID NO: 36392 - protein, 16 aa, Homo sapiens
CARVLRGSGEFCFDMW

SEQ ID NO: 36393 - protein, 20 aa, Homo sapiens
CAREGYGCTSTRCFYYMDVW

SEQ ID NO: 36394 - protein, 14 aa, Homo sapiens
CARSLYYYWYIDVW

SEQ ID NO: 36395 - protein, 21 aa, Homo sapiens
CARVKVLYYSGLASPYSIDYW

SEQ ID NO: 36396 - protein, 17 aa, Homo sapiens
CARSRGIAVPDRDFDYW

SEQ ID NO: 36397 - protein, 16 aa, Homo sapiens
CARDIFSSGWYSFDNW

SEQ ID NO: 36398 - protein, 15 aa, Homo sapiens
CVRAPPWVQRPFDYW

SEQ ID NO: 36399 - protein, 19 aa, Homo sapiens
CTRVSHARLQWLAPYFDHW

SEQ ID NO: 36400 - protein, 16 aa, Homo sapiens
CAKPLWFGELLFFDNW

SEQ ID NO: 36401 - protein, 14 aa, Homo sapiens
CVREGFGWRGPDYW

SEQ ID NO: 36402 - protein, 16 aa, Homo sapiens
CVRGGNRNGHKNFDYW

SEQ ID NO: 36403 - protein, 13 aa, Homo sapiens
CACSNTWYHFHYW

SEQ ID NO: 36404 - protein, 16 aa, Homo sapiens
CARAITGDVQAALDVW

SEQ ID NO: 36405 - protein, 13 aa, Homo sapiens
CAKGRGLGAFDMW

SEQ ID NO: 36406 - protein, 17 aa, Homo sapiens
CARKSPHTMDNGWFGPW

SEQ ID NO: 36407 - protein, 21 aa, Homo sapiens
CARMFLHYYDNGGHSSWIDSW

SEQ ID NO: 36408 - protein, 16 aa, Homo sapiens
CARDCGGDCYHALDIW

SEQ ID NO: 36409 - protein, 19 aa, Homo sapiens
CARDYCSDVSCFIGGFDIW

SEQ ID NO: 36410 - protein, 15 aa, Homo sapiens
CAISVGGSSPGIDYW

SEQ ID NO: 36411 - protein, 21 aa, Homo sapiens
CAVRGDRNTLFGVVPDVFDIW

SEQ ID NO: 36412 - protein, 16 aa, Homo sapiens
CAKDKTNWGWTWIDSW

SEQ ID NO: 36413 - protein, 21 aa, Homo sapiens
CATGSKTPIVVFINPHPFDRW

SEQ ID NO: 36414 - protein, 16 aa, Homo sapiens
CARRRVVPAASPFDPW

SEQ ID NO: 36415 - protein, 16 aa, Homo sapiens
CAKGGPWFPSSYMDVW

SEQ ID NO: 36416 - protein, 17 aa, Homo sapiens
CARLLGFWNGFSTFDYW

SEQ ID NO: 36417 - protein, 23 aa, Homo sapiens
CARALGYSYGYGPLPYHYYFDYW

SEQ ID NO: 36418 - protein, 19 aa, Homo sapiens
CARHGAGVVNWYYYYMDVW

SEQ ID NO: 36419 - protein, 24 aa, Homo sapiens
CARRGSSGYYDSTFYYYVDWFDPW

SEQ ID NO: 36420 - protein, 17 aa, Homo sapiens
CAKSGEVHATIYYFDNW

SEQ ID NO: 36421 - protein, 18 aa, Homo sapiens
CARAQALSGPGLYYFDYW

SEQ ID NO: 36422 - protein, 21 aa, Homo sapiens
CARINDVLTPTKPNRGPFDIW

SEQ ID NO: 36423 - protein, 17 aa, Homo sapiens
CSRPRSGYYYPRLFDKW

SEQ ID NO: 36424 - protein, 18 aa, Homo sapiens
CARSHSMVGLARMSFDVW

SEQ ID NO: 36425 - protein, 18 aa, Homo sapiens
CARDPPRYNWKPPSFDLW

SEQ ID NO: 36426 - protein, 16 aa, Homo sapiens
CTRDRVSYNWGHFDHW

SEQ ID NO: 36427 - protein, 21 aa, Homo sapiens
CARVTFFDWLLSSTTYYFDSW

SEQ ID NO: 36428 - protein, 17 aa, Homo sapiens
CARCIVDGGVSPLFDYW

SEQ ID NO: 36429 - protein, 18 aa, Homo sapiens
CAREPPRISARPRGFDIW

SEQ ID NO: 36430 - protein, 19 aa, Homo sapiens
CARGISWQISRYRNWFDSW

SEQ ID NO: 36431 - protein, 14 aa, Homo sapiens
CASPASVNLYMDVW

SEQ ID NO: 36432 - protein, 11 aa, Homo sapiens
CVYRRYYFDDW

SEQ ID NO: 36433 - protein, 16 aa, Homo sapiens
CARAGVSDEDWYFDLW

SEQ ID NO: 36434 - protein, 14 aa, Homo sapiens
CATLVYGETGFDYW

SEQ ID NO: 36435 - protein, 14 aa, Homo sapiens
CARHGGPYGASDIW

SEQ ID NO: 36436 - protein, 14 aa, Homo sapiens
CGRGSLIGVDFDYW

SEQ ID NO: 36437 - protein, 16 aa, Homo sapiens
CARRAYNYGYYYIDYW

SEQ ID NO: 36438 - protein, 20 aa, Homo sapiens
CVRGTLTARRSTVNPAFDVW

SEQ ID NO: 36439 - protein, 18 aa, Homo sapiens
CAKDGREGLVAPYYFDFW

SEQ ID NO: 36440 - protein, 23 aa, Homo sapiens
CARFHPPAMFYYDISGSDSFDIW

SEQ ID NO: 36441 - protein, 17 aa, Homo sapiens
CVRDFSTTILDYYMDVW

SEQ ID NO: 36442 - protein, 15 aa, Homo sapiens
CARSGNSYGPNLDYW

SEQ ID NO: 36443 - protein, 16 aa, Homo sapiens
CARQVYGDSDWYFDLW

SEQ ID NO: 36444 - protein, 13 aa, Homo sapiens
CTREQDGDYMDVW

SEQ ID NO: 36445 - protein, 17 aa, Homo sapiens
CAHRDHYYGPTGWFDPW

SEQ ID NO: 36446 - protein, 18 aa, Homo sapiens
CARVISAGWYSGKAFDMW

SEQ ID NO: 36447 - protein, 13 aa, Homo sapiens
CFSATDNNRAYVF

SEQ ID NO: 36448 - protein, 15 aa, Homo sapiens
CAKCRIAARPLFDSW

SEQ ID NO: 36449 - protein, 19 aa, Homo sapiens
CTRDGSAEVTQWYYYVDVW

SEQ ID NO: 36450 - protein, 17 aa, Homo sapiens
CVSSSRGYFGWFWFDPW

SEQ ID NO: 36451 - protein, 18 aa, Homo sapiens
CARVYCSPTSCQYYFDYW

SEQ ID NO: 36452 - protein, 12 aa, Homo sapiens
CQAWVSRTAVIF

SEQ ID NO: 36453 - protein, 12 aa, Homo sapiens
CQMWDSSTNQGF

SEQ ID NO: 36454 - protein, 16 aa, Homo sapiens
CAKDRNFVVLAAPDYW

SEQ ID NO: 36455 - protein, 12 aa, Homo sapiens
CQHYNSFSLYVF

SEQ ID NO: 36456 - protein, 20 aa, Homo sapiens
CARARVPTAMVLRYFAMDVW

SEQ ID NO: 36457 - protein, 16 aa, Homo sapiens
CAKGREQLWLGYFDFW

SEQ ID NO: 36458 - protein, 25 aa, Homo sapiens
CARLRLLHTAVVPTAIPGDWYFDLW

SEQ ID NO: 36459 - protein, 20 aa, Homo sapiens
CVRSSQLVPLYYYFYYMDVW

SEQ ID NO: 36460 - protein, 20 aa, Homo sapiens
CATVPYNSKRGNFYYYMDVW

SEQ ID NO: 36461 - protein, 19 aa, Homo sapiens
CARDSGSPSPYDYYYMDVW

SEQ ID NO: 36462 - protein, 15 aa, Homo sapiens
CARRLRGSYPYFDYW

SEQ ID NO: 36463 - protein, 23 aa, Homo sapiens
CARDYWESNYDDYAESAAYFDSW

SEQ ID NO: 36464 - protein, 20 aa, Homo sapiens
CAKGGPSSSFIDPDLYFDTW

SEQ ID NO: 36465 - protein, 19 aa, Homo sapiens
CARAVSSSSWSHPEYFYHW

SEQ ID NO: 36466 - protein, 21 aa, Homo sapiens
CARDPYSGSYGSLYYYYMDVW

SEQ ID NO: 36467 - protein, 15 aa, Homo sapiens
CVRDGDPYNWNFDYW

SEQ ID NO: 36468 - protein, 21 aa, Homo sapiens
CARGQPPPIYCGGGTCYLDFW

SEQ ID NO: 36469 - protein, 17 aa, Homo sapiens
CARDRGDWYRIDAFDIW

SEQ ID NO: 36470 - protein, 16 aa, Homo sapiens
CARDCPNEDRCLGDYW

SEQ ID NO: 36471 - protein, 15 aa, Homo sapiens
CARGLAVALNAFDVW

SEQ ID NO: 36472 - protein, 16 aa, Homo sapiens
CATFTTMVTFDAFHIW

SEQ ID NO: 36473 - protein, 22 aa, Homo sapiens
CARGGATGGIYSVGGELPFDFW

SEQ ID NO: 36474 - protein, 16 aa, Homo sapiens
CARVATMVTLDAFRIW

SEQ ID NO: 36475 - protein, 17 aa, Homo sapiens
CARVKWQQVVGFAFDYW

SEQ ID NO: 36476 - protein, 14 aa, Homo sapiens
CATESSGEDWFDPW

SEQ ID NO: 36477 - protein, 22 aa, Homo sapiens
CARSVGLYCSGPTCTPYYFDYW

SEQ ID NO: 36478 - protein, 15 aa, Homo sapiens
CQSADNYGTYPGVVF

SEQ ID NO: 36479 - protein, 20 aa, Homo sapiens
CARSADPGNCSPSTCYVDVW

SEQ ID NO: 36480 - protein, 18 aa, Homo sapiens
CARMSGSGGYSSYPFDKW

SEQ ID NO: 36481 - protein, 20 aa, Homo sapiens
CVRQVIMTTFEVAIGYFDLW

SEQ ID NO: 36482 - protein, 17 aa, Homo sapiens
CARHYTARPSDYRLDYW

SEQ ID NO: 36483 - protein, 14 aa, Homo sapiens
CAKSGNWNRMFDPW

SEQ ID NO: 36484 - protein, 15 aa, Homo sapiens
CVRSSTWEEKYFPHW

SEQ ID NO: 36485 - protein, 16 aa, Homo sapiens
CAASPTGAFGWYFESW

SEQ ID NO: 36486 - protein, 14 aa, Homo sapiens
CVRGGGVFNFFDYW

SEQ ID NO: 36487 - protein, 18 aa, Homo sapiens
CARSYDYVWTTNRGIDYW

SEQ ID NO: 36488 - protein, 19 aa, Homo sapiens
CAHSLYYFETSGYYPFDSW

SEQ ID NO: 36489 - protein, 17 aa, Homo sapiens
CAKEGSTWYDLNYFENW

SEQ ID NO: 36490 - protein, 21 aa, Homo sapiens
CARGYCPDTSCYFPKNYLDVW

SEQ ID NO: 36491 - protein, 17 aa, Homo sapiens
CARHDSPYDSSGYYDYW

SEQ ID NO: 36492 - protein, 15 aa, Homo sapiens
CQSYDQSHGSARWVF

SEQ ID NO: 36493 - protein, 17 aa, Homo sapiens
CARIWGYWETYNWFDPW

SEQ ID NO: 36494 - protein, 13 aa, Homo sapiens
CTSRDSSGEHIFF

SEQ ID NO: 36495 - protein, 17 aa, Homo sapiens
CAAYTRANYYYYYMDVW

SEQ ID NO: 36496 - protein, 18 aa, Homo sapiens
CAKAPLTTVTTRTLFDYW

SEQ ID NO: 36497 - protein, 20 aa, Homo sapiens
CARHRTFCSVYSCPGHFDFW

SEQ ID NO: 36498 - protein, 19 aa, Homo sapiens
CARHTDVKYSTSLGFFDPW

SEQ ID NO: 36499 - protein, 26 aa, Homo sapiens
CARSPTYYYGSGSLARVATGHYFDYW

SEQ ID NO: 36500 - protein, 27 aa, Homo sapiens
CARQLGGFGEVFLGITVRNPYYYMDVW

SEQ ID NO: 36501 - protein, 16 aa, Homo sapiens
CARVPLRGSSSYFDFW

SEQ ID NO: 36502 - protein, 18 aa, Homo sapiens
CARTSRPRGQTIGAFDIW

SEQ ID NO: 36503 - protein, 24 aa, Homo sapiens
CARDYREAVAAGGGYYYYFYMDVW

SEQ ID NO: 36504 - protein, 17 aa, Homo sapiens
CVTYYYDSSGTHAFDIW

SEQ ID NO: 36505 - protein, 15 aa, Homo sapiens
CARQFSSSTSDFDYW

SEQ ID NO: 36506 - protein, 14 aa, Homo sapiens
CVSGGGWPYYFDSW

SEQ ID NO: 36507 - protein, 21 aa, Homo sapiens
CARHDWSGSTRYYYYYYMDVW

SEQ ID NO: 36508 - protein, 19 aa, Homo sapiens
CAKVGEGYKIILGYYFDHW

SEQ ID NO: 36509 - protein, 16 aa, Homo sapiens
CATLVWGSYRGYFDYW

SEQ ID NO: 36510 - protein, 15 aa, Homo sapiens
CVRDHISGSEAFDYW

SEQ ID NO: 36511 - protein, 15 aa, Homo sapiens
CARDRGNSFLFFDYW

SEQ ID NO: 36512 - protein, 18 aa, Homo sapiens
CARSYYDILTGYSNFDYW

SEQ ID NO: 36513 - protein, 16 aa, Homo sapiens
CAKDRASYGANYFDLW

SEQ ID NO: 36514 - protein, 23 aa, Homo sapiens
CARDHSSDYDSSGYRLRDAFDIW

SEQ ID NO: 36515 - protein, 22 aa, Homo sapiens
CAKDWKVVTPGVLTSYYYMDVW

SEQ ID NO: 36516 - protein, 18 aa, Homo sapiens
CARDIRSLLWFGERFDYW

SEQ ID NO: 36517 - protein, 12 aa, Homo sapiens
CQQYNSNFPWAF

SEQ ID NO: 36518 - protein, 20 aa, Homo sapiens
CARPPGAYSSSWYGDHYDYW

SEQ ID NO: 36519 - protein, 23 aa, Homo sapiens
CARGRRILLRVYDTLPLIGFDIW

SEQ ID NO: 36520 - protein, 21 aa, Homo sapiens
CTRDLSGVVPAAMGYHYMDVW

SEQ ID NO: 36521 - protein, 14 aa, Homo sapiens
CARGRRWSGPEDYW

SEQ ID NO: 36522 - protein, 12 aa, Homo sapiens
CQSHDSSPSALF

SEQ ID NO: 36523 - protein, 16 aa, Homo sapiens
CARTGDSPNYYAFDIW

SEQ ID NO: 36524 - protein, 35 aa, Homo sapiens
CTAYMELRSLTSDDTAVYYCARVATMVTLDAFRIW

SEQ ID NO: 36525 - protein, 21 aa, Homo sapiens
CAKEGGFAWKMMAERDWLDSW

SEQ ID NO: 36526 - protein, 18 aa, Homo sapiens
CARGDTSGWTARSAFDVW

SEQ ID NO: 36527 - protein, 16 aa, Homo sapiens
CGRERGYRGLGYHDSW

SEQ ID NO: 36528 - protein, 21 aa, Homo sapiens
CARGCSSTSCRYEASDAFDIW

SEQ ID NO: 36529 - protein, 12 aa, Homo sapiens
CATYTAMDGDYW

SEQ ID NO: 36530 - protein, 15 aa, Homo sapiens
CAREGSSWLNWFDSW

SEQ ID NO: 36531 - protein, 24 aa, Homo sapiens
CARLGGMMLFMTTVTTPFTYFDYW

SEQ ID NO: 36532 - protein, 19 aa, Homo sapiens
CARDTYNGRSQPDGALDVW

SEQ ID NO: 36533 - protein, 15 aa, Homo sapiens
CARGGVRDDEAFDFW

SEQ ID NO: 36534 - protein, 13 aa, Homo sapiens
CAKRGQREDIDYW

SEQ ID NO: 36535 - protein, 16 aa, Homo sapiens
CARDGRWASFRALDYW

SEQ ID NO: 36536 - protein, 16 aa, Homo sapiens
CARDWLLRPRGDLDYW

SEQ ID NO: 36537 - protein, 18 aa, Homo sapiens
CASRDFWSGNSYSYMDVW

SEQ ID NO: 36538 - protein, 15 aa, Homo sapiens
CVKAKSSNPYRGDYW

SEQ ID NO: 36539 - protein, 15 aa, Homo sapiens
CAKGSGYSDWYLDYW

SEQ ID NO: 36540 - protein, 17 aa, Homo sapiens
CARLQHIVATGEGFDYW

SEQ ID NO: 36541 - protein, 18 aa, Homo sapiens
CAKDHGYYGSGITAFDIW

SEQ ID NO: 36542 - protein, 17 aa, Homo sapiens
CARDKSSSAPLSLFDYW

SEQ ID NO: 36543 - protein, 12 aa, Homo sapiens
CQLYSSSPITFF

SEQ ID NO: 36544 - protein, 19 aa, Homo sapiens
CVKDLKSGGSSWVGAFDIW

SEQ ID NO: 36545 - protein, 13 aa, Homo sapiens
CARQHQITTTDYW

SEQ ID NO: 36546 - protein, 13 aa, Homo sapiens
CARWSSQGGFDYW

SEQ ID NO: 36547 - protein, 17 aa, Homo sapiens
CARAGSGSSWSYYMDVW

SEQ ID NO: 36548 - protein, 15 aa, Homo sapiens
CVRQENYYHFYMDVW

SEQ ID NO: 36549 - protein, 27 aa, Homo sapiens
CAKRAGVGGHCRGGMCYSESYFYMDVW

SEQ ID NO: 36550 - protein, 18 aa, Homo sapiens
CAKGRRTTVVTPGYFEYW

SEQ ID NO: 36551 - protein, 21 aa, Homo sapiens
CARVGGLSNLGVVTYNWFDSW

SEQ ID NO: 36552 - protein, 15 aa, Homo sapiens
CAHRPGPYSGSYDYW

SEQ ID NO: 36553 - protein, 18 aa, Homo sapiens
CVKGPLTMPHQYYYMDVW

SEQ ID NO: 36554 - protein, 22 aa, Homo sapiens
CAKEGPYTSGTFYYYYYSMDVW

SEQ ID NO: 36555 - protein, 17 aa, Homo sapiens
CARGDRYSGGRWYFDFW

SEQ ID NO: 36556 - protein, 28 aa, Homo sapiens
CARDRADKWYSGYDGIAAAVGAAPVDYW

SEQ ID NO: 36557 - protein, 16 aa, Homo sapiens
CARHSEATGHYYFDRW

SEQ ID NO: 36558 - protein, 13 aa, Homo sapiens
CQLRRNWPPRLSF

SEQ ID NO: 36559 - protein, 17 aa, Homo sapiens
CARVEEAAAWWYAFDIW

SEQ ID NO: 36560 - protein, 18 aa, Homo sapiens
CAREKVEPSGGVDGFDMW

SEQ ID NO: 36561 - protein, 16 aa, Homo sapiens
CVSRSAVAGMWASDYW

SEQ ID NO: 36562 - protein, 15 aa, Homo sapiens
CARLFSRDSGWFDTW

SEQ ID NO: 36563 - protein, 15 aa, Homo sapiens
CVRSTRAFTNAYDIW

SEQ ID NO: 36564 - protein, 15 aa, Homo sapiens
CAREGRDTNGAFDIW

SEQ ID NO: 36565 - protein, 22 aa, Homo sapiens
CAHRGGTYYYDSRGVSDAFDIW

SEQ ID NO: 36566 - protein, 19 aa, Homo sapiens
CARDGGKLIVGGNNWFDPW

SEQ ID NO: 36567 - protein, 15 aa, Homo sapiens
CARARFWSAHEFDFW

SEQ ID NO: 36568 - protein, 22 aa, Homo sapiens
CAKGSTRRSCNSDSCWADFDSW

SEQ ID NO: 36569 - protein, 13 aa, Homo sapiens
CATEVLVGPFKYW

SEQ ID NO: 36570 - protein, 23 aa, Homo sapiens
CARGIFWSRQLPHIGTSNWFDPW

SEQ ID NO: 36571 - protein, 23 aa, Homo sapiens
CAITLHYYPSSGYYDDSYYLDVW

SEQ ID NO: 36572 - protein, 24 aa, Homo sapiens
CARDGTYYYDSSGYPTHDDAFDIW

SEQ ID NO: 36573 - protein, 17 aa, Homo sapiens
CARPAHTGYTTYWFDPW

SEQ ID NO: 36574 - protein, 14 aa, Homo sapiens
CTREEVLDWFFDLW

SEQ ID NO: 36575 - protein, 22 aa, Homo sapiens
CTTDPQSEWELLLPGQDAFDIW

SEQ ID NO: 36576 - protein, 15 aa, Homo sapiens
CARQPPRGEWCFDLW

SEQ ID NO: 36577 - protein, 22 aa, Homo sapiens
CVRERHRRSSWTAPKVQIFDYW

SEQ ID NO: 36578 - protein, 17 aa, Homo sapiens
CARARGYNYGQEAFDIW

SEQ ID NO: 36579 - protein, 16 aa, Homo sapiens
CARHGSEGRSDGFDYW

SEQ ID NO: 36580 - protein, 23 aa, Homo sapiens
CARALIVLRYFDWLLARGSFDYW

SEQ ID NO: 36581 - protein, 19 aa, Homo sapiens
CARSDCSRTSCPLRAFDNW

SEQ ID NO: 36582 - protein, 20 aa, Homo sapiens
CARDGLVKASGSHPYYFDYW

SEQ ID NO: 36583 - protein, 21 aa, Homo sapiens
CARGLEGCSSAGCFTEGFDFW

SEQ ID NO: 36584 - protein, 17 aa, Homo sapiens
CARDIGYSSSSLNFDYW

SEQ ID NO: 36585 - protein, 17 aa, Homo sapiens
CAKGSGGYSLRPWFDSW

SEQ ID NO: 36586 - protein, 16 aa, Homo sapiens
CARRYSSSSLSGFDPW

SEQ ID NO: 36587 - protein, 17 aa, Homo sapiens
CARVAAQQLAARIFDFW

SEQ ID NO: 36588 - protein, 16 aa, Homo sapiens
CARDMSGSSGNWFDRW

SEQ ID NO: 36589 - protein, 19 aa, Homo sapiens
CARRGLSVASYYFYYMDVW

SEQ ID NO: 36590 - protein, 13 aa, Homo sapiens
CVRESTARHFDYW

SEQ ID NO: 36591 - protein, 21 aa, Homo sapiens
CARQIRYYYDSSGYYYYFDDW

SEQ ID NO: 36592 - protein, 24 aa, Homo sapiens
CARGHGGHDYGDYVKVRLGAFDIW

SEQ ID NO: 36593 - protein, 19 aa, Homo sapiens
CARDNHAYSSGWYRWLDPW

SEQ ID NO: 36594 - protein, 20 aa, Homo sapiens
CARGIMATYYDIRGWYFDLW

SEQ ID NO: 36595 - protein, 17 aa, Homo sapiens
CARGLVGRGARNWFDPW

SEQ ID NO: 36596 - protein, 15 aa, Homo sapiens
CARDGLDFFFYLDVW

SEQ ID NO: 36597 - protein, 24 aa, Homo sapiens
CTRGRHCTSVGCLEDNYYYYMDVW

SEQ ID NO: 36598 - protein, 14 aa, Homo sapiens
CARGMHQYGSGDYW

SEQ ID NO: 36599 - protein, 17 aa, Homo sapiens
CASALELRFPYYYMDVW

SEQ ID NO: 36600 - protein, 17 aa, Homo sapiens
CVRHDQYGTGQGYFHPW

SEQ ID NO: 36601 - protein, 19 aa, Homo sapiens
CAIAQKLRRGLGLTAFDIW

SEQ ID NO: 36602 - protein, 25 aa, Homo sapiens
CARESPSYDFWSGSYAPFHYYTDVW

SEQ ID NO: 36603 - protein, 22 aa, Homo sapiens
CARDSSYYASSGYYLPGYFQHW

SEQ ID NO: 36604 - protein, 21 aa, Homo sapiens
CASDRTGGVNGLTVSFGFDNW

SEQ ID NO: 36605 - protein, 23 aa, Homo sapiens
CAREKVSERVIISSGRGFALDIW

SEQ ID NO: 36606 - protein, 23 aa, Homo sapiens
CSSYTSRSAFDVTLRSNTFDLIF

SEQ ID NO: 36607 - protein, 14 aa, Homo sapiens
CARLQLWSSHFDFW

SEQ ID NO: 36608 - protein, 20 aa, Homo sapiens
CARDRPFPIFGVAPAHFDYW

SEQ ID NO: 36609 - protein, 16 aa, Homo sapiens
CTKGGGSRNPYYFDFW

SEQ ID NO: 36610 - protein, 21 aa, Homo sapiens
CARDKVVAASGSGSVRGFDYW

SEQ ID NO: 36611 - protein, 18 aa, Homo sapiens
CAREMGAAGTFGRDFQYW

SEQ ID NO: 36612 - protein, 17 aa, Homo sapiens
CASLEVAGRVLDWFDPW

SEQ ID NO: 36613 - protein, 18 aa, Homo sapiens
CASRYCNDGNCYYPPDYW

SEQ ID NO: 36614 - protein, 15 aa, Homo sapiens
CAGSHTSSWSRFDCW

SEQ ID NO: 36615 - protein, 18 aa, Homo sapiens
CARIRDFYYDRSGYPDYW

SEQ ID NO: 36616 - protein, 16 aa, Homo sapiens
CARDGTPGYLDAFDIW

SEQ ID NO: 36617 - protein, 17 aa, Homo sapiens
CVSGSQMFFDTRSFDYW

SEQ ID NO: 36618 - protein, 22 aa, Homo sapiens
CAQHYSYCSALSCLTSGWFDRW

SEQ ID NO: 36619 - protein, 11 aa, Homo sapiens
CYSAADYNWVF

SEQ ID NO: 36620 - protein, 27 aa, Homo sapiens
CARAPIGYCSSTSCYGGGLYYYYMDVW

SEQ ID NO: 36621 - protein, 15 aa, Homo sapiens
CNSRDNSGNHFNWVF

SEQ ID NO: 36622 - protein, 18 aa, Homo sapiens
CARAGAIFGVVDNWFDPW

SEQ ID NO: 36623 - protein, 19 aa, Homo sapiens
CARNPPRSGSYYNWYFDIW

SEQ ID NO: 36624 - protein, 17 aa, Homo sapiens
CARHHCTNGVCFSFDLW

SEQ ID NO: 36625 - protein, 14 aa, Homo sapiens
CARMAKFQYAFDIW

SEQ ID NO: 36626 - protein, 19 aa, Homo sapiens
CARGQIFYGSGSYWYFDLW

SEQ ID NO: 36627 - protein, 15 aa, Homo sapiens
CARDRVAAAGPFDCW

SEQ ID NO: 36628 - protein, 16 aa, Homo sapiens
CARQGYVGSRWWFDIW

SEQ ID NO: 36629 - protein, 17 aa, Homo sapiens
CARFGQLWVLGFYMDVW

SEQ ID NO: 36630 - protein, 21 aa, Homo sapiens
CARIPKYTNSWTPFLYYFDVW

SEQ ID NO: 36631 - protein, 18 aa, Homo sapiens
CVRAPAGSNTGWYFFDQW

SEQ ID NO: 36632 - protein, 17 aa, Homo sapiens
CATRHDSSGYYFGWDYW

SEQ ID NO: 36633 - protein, 13 aa, Homo sapiens
CMQGTLWPPAWTF

SEQ ID NO: 36634 - protein, 21 aa, Homo sapiens
CASTPRITMIVVVMGGYFDYW

SEQ ID NO: 36635 - protein, 16 aa, Homo sapiens
CARGGVNYDLAWFDVW

SEQ ID NO: 36636 - protein, 14 aa, Homo sapiens
CARKGRFVWAFDIW

SEQ ID NO: 36637 - protein, 16 aa, Homo sapiens
CARFVEMSGTDYFDYW

SEQ ID NO: 36638 - protein, 18 aa, Homo sapiens
CARSRVNEYGDYEGFDYW

SEQ ID NO: 36639 - protein, 18 aa, Homo sapiens
CAIHPRQQLVAFDTFDIW

SEQ ID NO: 36640 - protein, 18 aa, Homo sapiens
CATARGTGYGGNSGFDYW

SEQ ID NO: 36641 - protein, 15 aa, Homo sapiens
CARHRGTSSDPFDHW

SEQ ID NO: 36642 - protein, 18 aa, Homo sapiens
CARVWGCSGTSCPTFEYW

SEQ ID NO: 36643 - protein, 23 aa, Homo sapiens
CARDVYCTSTSCYSGPPYYFDYW

SEQ ID NO: 36644 - protein, 19 aa, Homo sapiens
CARDGDRYSSAPYNWFDPW

SEQ ID NO: 36645 - protein, 20 aa, Homo sapiens
CAREDGYGSGTYHEGEFDYW

SEQ ID NO: 36646 - protein, 22 aa, Homo sapiens
CAREPSEPTIFGVVIKGGFDYW

SEQ ID NO: 36647 - protein, 19 aa, Homo sapiens
CARGLFSSNWYRSDYVDVW

SEQ ID NO: 36648 - protein, 24 aa, Homo sapiens
CAKNRETFWGNYRPFYYYFYMDVW

SEQ ID NO: 36649 - protein, 20 aa, Homo sapiens
CARGLVATMTTYYYYYMDVW

SEQ ID NO: 36650 - protein, 19 aa, Homo sapiens
CSRDDYDYWRGRTNYFDYW

SEQ ID NO: 36651 - protein, 23 aa, Homo sapiens
CARQPDSSSFYYEFWRAACFDFW

SEQ ID NO: 36652 - protein, 17 aa, Homo sapiens
CARDVEQYYESGGPDYW

SEQ ID NO: 36653 - protein, 16 aa, Homo sapiens
CATWDRSLSAGRNWVF

SEQ ID NO: 36654 - protein, 23 aa, Homo sapiens
CTKSGYCTGGSCSSDYSYYMDVW

SEQ ID NO: 36655 - protein, 17 aa, Homo sapiens
CAKADSGSFWRGDFDYW

SEQ ID NO: 36656 - protein, 17 aa, Homo sapiens
CTSGYYGGAGSYGPDYW

SEQ ID NO: 36657 - protein, 19 aa, Homo sapiens
CAKDRTNYHILTGYYMDVW

SEQ ID NO: 36658 - protein, 23 aa, Homo sapiens
CAKDSQRSSGYRAPGYYYYMDVW

SEQ ID NO: 36659 - protein, 15 aa, Homo sapiens
CARERQGSTIYFDYW

SEQ ID NO: 36660 - protein, 12 aa, Homo sapiens
CGRVHVVFPDYW

SEQ ID NO: 36661 - protein, 17 aa, Homo sapiens
CARVGREDYNWDALDIW

SEQ ID NO: 36662 - protein, 16 aa, Homo sapiens
CARDYDSRSHRGFDYW

SEQ ID NO: 36663 - protein, 16 aa, Homo sapiens
CARGSEYQLLPPFDYW

SEQ ID NO: 36664 - protein, 19 aa, Homo sapiens
CASRNRGQQLDNSWYFDLW

SEQ ID NO: 36665 - protein, 19 aa, Homo sapiens
CARERGDNSGPGEYYYDYW

SEQ ID NO: 36666 - protein, 23 aa, Homo sapiens
CAKLGGRLDPDGDYYYYFYMDVW

SEQ ID NO: 36667 - protein, 12 aa, Homo sapiens
CLGRPWRGRDYW

SEQ ID NO: 36668 - protein, 13 aa, Homo sapiens
CAKGCLYSNCDYW

SEQ ID NO: 36669 - protein, 18 aa, Homo sapiens
CARDGRDGYTEIYYYDSW

SEQ ID NO: 36670 - protein, 21 aa, Homo sapiens
CAREVIEVGSTSSLNDAFDIW

SEQ ID NO: 36671 - protein, 17 aa, Homo sapiens
CARMSGGDYVPSPFDYW

SEQ ID NO: 36672 - protein, 15 aa, Homo sapiens [sequence omitted]

SEQ ID NO: 36673 - protein, 24 aa, Homo sapiens
CAKDISTVWDSSGYQLTQNAFDIW

SEQ ID NO: 36674 - protein, 15 aa, Homo sapiens
CARASGGSGGYFQFW

SEQ ID NO: 36675 - protein, 16 aa, Homo sapiens
CARARGWIQLDHFDYW

SEQ ID NO: 36676 - protein, 16 aa, Homo sapiens
CASRGYGGYESYFDYW

SEQ ID NO: 36677 - protein, 16 aa, Homo sapiens
CVRDKRGNWAYYFDYW

SEQ ID NO: 36678 - protein, 22 aa, Homo sapiens
CARDAAQCSLNKCFFDYYMDVW

SEQ ID NO: 36679 - protein, 20 aa, Homo sapiens
CARGGLVEYAPSDYYYMDVW

SEQ ID NO: 36680 - protein, 14 aa, Homo sapiens
CARISVVSSLFDFW

SEQ ID NO: 36681 - protein, 20 aa, Homo sapiens
CAKDFPRYNWNYVGAYFDLW

SEQ ID NO: 36682 - protein, 15 aa, Homo sapiens
CAREFIVATAEFDHW

SEQ ID NO: 36683 - protein, 15 aa, Homo sapiens
CARDLTTIRNWLDPW

SEQ ID NO: 36684 - protein, 15 aa, Homo sapiens
CAKMGPNGYYYYDSW

SEQ ID NO: 36685 - protein, 26 aa, Homo sapiens
CARSSPCSGGSCYTGPYYYYYYMDVW

SEQ ID NO: 36686 - protein, 20 aa, Homo sapiens
CARDRQWATYGIKNNLFDLW

SEQ ID NO: 36687 - protein, 24 aa, Homo sapiens
CVRGTIVQMMYAISGLGDNWFDPW

SEQ ID NO: 36688 - protein, 19 aa, Homo sapiens
CARISYDILTGYYLGFDYW

SEQ ID NO: 36689 - protein, 18 aa, Homo sapiens
CAKGDYYDSGGYYYFTSW

SEQ ID NO: 36690 - protein, 20 aa, Homo sapiens
CAKSGAHDFWSGSAPLFDYW

SEQ ID NO: 36691 - protein, 19 aa, Homo sapiens
CARDQIAIVVITSWYFDYW

SEQ ID NO: 36692 - protein, 15 aa, Homo sapiens
CARSPDYSSGWIDYW

SEQ ID NO: 36693 - protein, 18 aa, Homo sapiens
CAKSWGRYGDYDEYFDYW

SEQ ID NO: 36694 - protein, 19 aa, Homo sapiens
CAKRGVYNDFWSAYYFDYW

SEQ ID NO: 36695 - protein, 14 aa, Homo sapiens
CAREYAWLRYFDHW

SEQ ID NO: 36696 - protein, 16 aa, Homo sapiens
CARPYSGSYFFFVDYW

SEQ ID NO: 36697 - protein, 19 aa, Homo sapiens
CARGGGESGWYNSYYMDVW

SEQ ID NO: 36698 - protein, 17 aa, Homo sapiens
CAKLYSSSSVAGWFDPW

SEQ ID NO: 36699 - protein, 16 aa, Homo sapiens
CTKYGSSSSWYYFDSW

SEQ ID NO: 36700 - protein, 17 aa, Homo sapiens
CARGFWSGYYVVNFDHW

SEQ ID NO: 36701 - protein, 13 aa, Homo sapiens
CASESGSYVFDYW

SEQ ID NO: 36702 - protein, 20 aa, Homo sapiens
CARHWGLRKPDYFYYYMDVW

SEQ ID NO: 36703 - protein, 23 aa, Homo sapiens
CARDSLRYCSGVGCYPLNWFDPW

SEQ ID NO: 36704 - protein, 24 aa, Homo sapiens
CAHSQGPSGYDSPGLGVDDAFDIW

SEQ ID NO: 36705 - protein, 17 aa, Homo sapiens
CARVLGTLGWYYYMDVW

SEQ ID NO: 36706 - protein, 16 aa, Homo sapiens
CAGLFSLGDWYSFDPW

SEQ ID NO: 36707 - protein, 16 aa, Homo sapiens
CAGEATATYLRYFHLW

SEQ ID NO: 36708 - protein, 18 aa, Homo sapiens
CATAYSGSYWGAEAFDIW

SEQ ID NO: 36709 - protein, 15 aa, Homo sapiens
CATLGISYGNSFDIW

SEQ ID NO: 36710 - protein, 16 aa, Homo sapiens
CARERSYSGYDYFDQW

SEQ ID NO: 36711 - protein, 18 aa, Homo sapiens
CARHYIETWQQLGYIDYW

SEQ ID NO: 36712 - protein, 16 aa, Homo sapiens
CARLLIGGEWRGFDYW

SEQ ID NO: 36713 - protein, 21 aa, Homo sapiens
CVKDLTNDFWSGYVPHYFDYW

SEQ ID NO: 36714 - protein, 23 aa, Homo sapiens
CARVEEYYYDTHRIRQTRYFDLW

SEQ ID NO: 36715 - protein, 19 aa, Homo sapiens
CASIECIKGFCSVYYFDHW

SEQ ID NO: 36716 - protein, 17 aa, Homo sapiens
CARALDGPVYWYYMDVW

SEQ ID NO: 36717 - protein, 13 aa, Homo sapiens
CVKEDTVTPFDCW

SEQ ID NO: 36718 - protein, 16 aa, Homo sapiens
CARDVSLTVVTGFDYW

SEQ ID NO: 36719 - protein, 18 aa, Homo sapiens
CAKDTGDDYGDYGPFDYW

SEQ ID NO: 36720 - protein, 17 aa, Homo sapiens
CARDPYYESSGSYSDYW

SEQ ID NO: 36721 - protein, 17 aa, Homo sapiens
CAKDLWLQQLGRNFDYW

SEQ ID NO: 36722 - protein, 18 aa, Homo sapiens
CARQGYQLVPKLFYFDNW

SEQ ID NO: 36723 - protein, 19 aa, Homo sapiens
CAKPYYQLPSYYYYYMDVW

SEQ ID NO: 36724 - protein, 18 aa, Homo sapiens
CASRWVAVAGTDDGPDYW

SEQ ID NO: 36725 - protein, 18 aa, Homo sapiens
CASPRSIVGITSDWFDSW

SEQ ID NO: 36726 - protein, 12 aa, Homo sapiens
CQQYDHLLTWTF

SEQ ID NO: 36727 - protein, 18 aa, Homo sapiens
CAKGLIYGDYAHDAFDIW

SEQ ID NO: 36728 - protein, 17 aa, Homo sapiens
CARLIDGELGVLNFDYW

SEQ ID NO: 36729 - protein, 15 aa, Homo sapiens
CALIGYSNYAQFDSW

SEQ ID NO: 36730 - protein, 18 aa, Homo sapiens
CARDPYTSSYYSYYFDLW

SEQ ID NO: 36731 - protein, 14 aa, Homo sapiens
CARSWEMIYFVDYW

SEQ ID NO: 36732 - protein, 15 aa, Homo sapiens
CAKSVKWLQLLIDYW

SEQ ID NO: 36733 - protein, 16 aa, Homo sapiens
CAKGGERVGATWSDYW

SEQ ID NO: 36734 - protein, 18 aa, Homo sapiens
CARAVPGDYVWPHAFDIW

SEQ ID NO: 36735 - protein, 10 aa, Homo sapiens
CYTPEWLDPW

SEQ ID NO: 36736 - protein, 18 aa, Homo sapiens
CARDRGVAVTGRMGFDYW

SEQ ID NO: 36737 - protein, 14 aa, Homo sapiens
CTRRGITVDPFDYW

SEQ ID NO: 36738 - protein, 19 aa, Homo sapiens
CARVHKRYYYDSGEYFQHW

SEQ ID NO: 36739 - protein, 22 aa, Homo sapiens
CARAPYCSRSSCSLHYFYMDVW

SEQ ID NO: 36740 - protein, 17 aa, Homo sapiens
CAKDIRHSTTTGGGDYW

SEQ ID NO: 36741 - protein, 22 aa, Homo sapiens
CARGRAPAYASLRGFFFYMDVW

SEQ ID NO: 36742 - protein, 13 aa, Homo sapiens
CARSRNSGYYEYW

SEQ ID NO: 36743 - protein, 16 aa, Homo sapiens
CARDLRDYSDFFFDLW

SEQ ID NO: 36744 - protein, 16 aa, Homo sapiens
CARSFYSGHYYGIDYW

SEQ ID NO: 36745 - protein, 14 aa, Homo sapiens
CAREYRDYGDYDYW

SEQ ID NO: 36746 - protein, 16 aa, Homo sapiens
CARVPYSSKWFVFDQW

SEQ ID NO: 36747 - protein, 16 aa, Homo sapiens
CAKDWAAQPPSYFDSW

SEQ ID NO: 36748 - protein, 17 aa, Homo sapiens
CARPRGIAVAGRAFDIW

SEQ ID NO: 36749 - protein, 19 aa, Homo sapiens
CARSGGDSSGNYFSLFDSW

SEQ ID NO: 36750 - protein, 15 aa, Homo sapiens
CQQYNNWPIPTFGPF

SEQ ID NO: 36751 - protein, 20 aa, Homo sapiens
CARVPRYVRYEYYYYYMDVW

SEQ ID NO: 36752 - protein, 19 aa, Homo sapiens
CAREAPTSSGYYLSHVDYW

SEQ ID NO: 36753 - protein, 15 aa, Homo sapiens
CAKNYGGNRFFFDCW

SEQ ID NO: 36754 - protein, 21 aa, Homo sapiens
CTKDVADYDYSGPYYYYMDVW

SEQ ID NO: 36755 - protein, 18 aa, Homo sapiens
CARSKDPRQPPHDAFDTW

SEQ ID NO: 36756 - protein, 17 aa, Homo sapiens
CVRGGELRHLYYYMDVW

SEQ ID NO: 36757 - protein, 15 aa, Homo sapiens
CGRLPSRPARWFDPW

SEQ ID NO: 36758 - protein, 15 aa, Homo sapiens
CAKDRGWHRLDFDYW

SEQ ID NO: 36759 - protein, 19 aa, Homo sapiens
CARAGYSSNFYTGGDFDYW

SEQ ID NO: 36760 - protein, 21 aa, Homo sapiens
CATRKYCSGGSCYSFGSFDIW

SEQ ID NO: 36761 - protein, 19 aa, Homo sapiens
CARVYCSSSSCYDGGFDFW

SEQ ID NO: 36762 - protein, 20 aa, Homo sapiens
CARGLYGTDYSGNYYYMDVW

SEQ ID NO: 36763 - protein, 19 aa, Homo sapiens
CAKVKEPGYSVDRASFDSW

SEQ ID NO: 36764 - protein, 21 aa, Homo sapiens
CAKDYYDSGGYIHANDAFTIW

SEQ ID NO: 36765 - protein, 16 aa, Homo sapiens
CARRIAAMYDYYMDVW

SEQ ID NO: 36766 - protein, 13 aa, Homo sapiens [sequence omitted]

SEQ ID NO: 36767 - protein, 19 aa, Homo sapiens
CAKGFSPTYMTVLTCPDYW

SEQ ID NO: 36768 - protein, 19 aa, Homo sapiens
CARQEVVVTAPPLEAFDLW

SEQ ID NO: 36769 - protein, 16 aa, Homo sapiens
CVRNLHSGGWYADDYW

SEQ ID NO: 36770 - protein, 18 aa, Homo sapiens
CARDFRLRAEKGRGFDNW

SEQ ID NO: 36771 - protein, 14 aa, Homo sapiens
CGTWDNSPSALAIF

SEQ ID NO: 36772 - protein, 16 aa, Homo sapiens
CARGAVTTLQWYFDLW

SEQ ID NO: 36773 - protein, 22 aa, Homo sapiens
CAAAHCGGGCYWGGLTDAFDIW

SEQ ID NO: 36774 - protein, 15 aa, Homo sapiens
CGTWDGTLSAGQGVF

SEQ ID NO: 36775 - protein, 18 aa, Homo sapiens
CARDGDPTRPFRNAFDVW

SEQ ID NO: 36776 - protein, 23 aa, Homo sapiens
CARERGNRGYCSRTSCQTWFDPW

SEQ ID NO: 36777 - protein, 19 aa, Homo sapiens
CARGGSLGTVIITYYFDYW

SEQ ID NO: 36778 - protein, 17 aa, Homo sapiens
CAKDTSGSGGWYLVDYW

SEQ ID NO: 36779 - protein, 24 aa, Homo sapiens
CAKDLGPKLRFLGYLKNFDAFDIW

SEQ ID NO: 36780 - protein, 21 aa, Homo sapiens
CARTRYDYGAPGELYYYMDVW

SEQ ID NO: 36781 - protein, 23 aa, Homo sapiens
CARERRRGSCTSTSCRADYMDVW

SEQ ID NO: 36782 - protein, 19 aa, Homo sapiens
CAKAGDYYGSGTFSFFDYW

SEQ ID NO: 36783 - protein, 19 aa, Homo sapiens
CAKKSYLRGNGKYDAFDIW

SEQ ID NO: 36784 - protein, 19 aa, Homo sapiens
CARDQSSSWLYYYYYMDVW

SEQ ID NO: 36785 - protein, 17 aa, Homo sapiens
CAKYFYYDSSGYGFDFW

SEQ ID NO: 36786 - protein, 14 aa, Homo sapiens
CARDRGVRGIVDYW

SEQ ID NO: 36787 - protein, 18 aa, Homo sapiens
CARFGSRNGWHGDGFDLW

SEQ ID NO: 36788 - protein, 15 aa, Homo sapiens
CASQSETWTRFFDLW

SEQ ID NO: 36789 - protein, 19 aa, Homo sapiens
CARNARINNRDYYFYMDVW

SEQ ID NO: 36790 - protein, 19 aa, Homo sapiens
CAAATPTDGYRYGDAFHIW

SEQ ID NO: 36791 - protein, 21 aa, Homo sapiens
CATAYYDFWSGYSIHDTFDLW

SEQ ID NO: 36792 - protein, 15 aa, Homo sapiens
CARHKGMGADAFDIW

SEQ ID NO: 36793 - protein, 16 aa, Homo sapiens
CAGVYCSSTSCRFNYW

SEQ ID NO: 36794 - protein, 25 aa, Homo sapiens
CARGKMAGTGPKVHFLDIPYYFDYW

SEQ ID NO: 36795 - protein, 15 aa, Homo sapiens
CVRDGLYLSYYMDVW

SEQ ID NO: 36796 - protein, 15 aa, Homo sapiens
CVRSGASSSRAFHIW

SEQ ID NO: 36797 - protein, 16 aa, Homo sapiens
CSLTMLRMTPTLFDDW

SEQ ID NO: 36798 - protein, 21 aa, Homo sapiens
CARWTAAAGMGVYYYYYMDVW

SEQ ID NO: 36799 - protein, 22 aa, Homo sapiens
CAREAPLGGTATRPGGFAFDIW

SEQ ID NO: 36800 - protein, 17 aa, Homo sapiens
CARGGVSGDSYWFFDYW

SEQ ID NO: 36801 - protein, 23 aa, Homo sapiens
CARDPSPYFFDTNGPHYYYMDVW

SEQ ID NO: 36802 - protein, 24 aa, Homo sapiens
CAKELEEWSWSHGITGTGDAFNIW

SEQ ID NO: 36803 - protein, 16 aa, Homo sapiens
CATGPVVVRGGWFDPW

SEQ ID NO: 36804 - protein, 17 aa, Homo sapiens
CARERGSSGWNGGGDYW

SEQ ID NO: 36805 - protein, 16 aa, Homo sapiens
CARVGRGANWDDFDIW

SEQ ID NO: 36806 - protein, 19 aa, Homo sapiens
CARGGSGYTYGDGGALDYW

SEQ ID NO: 36807 - protein, 17 aa, Homo sapiens
CARGPDTAMIRGDFDSW

SEQ ID NO: 36808 - protein, 17 aa, Homo sapiens
CAKVLWMGSDAYYLDSW

SEQ ID NO: 36809 - protein, 21 aa, Homo sapiens
CTTALGDNSIIGVLIAPFDYW

SEQ ID NO: 36810 - protein, 22 aa, Homo sapiens
CARTYTGYCTTARCPPYYLDSW

SEQ ID NO: 36811 - protein, 20 aa, Homo sapiens
CVHRRLETHVDWNAGTSDYW

SEQ ID NO: 36812 - protein, 15 aa, Homo sapiens
CARLTKDVTPGFDFW

SEQ ID NO: 36813 - protein, 15 aa, Homo sapiens
CVRDAERWERRFDYW

SEQ ID NO: 36814 - protein, 24 aa, Homo sapiens
CARHLSYSSSWLPNLLITNWFDPW

SEQ ID NO: 36815 - protein, 18 aa, Homo sapiens
CARRGYNNDFYNWYFDLW

SEQ ID NO: 36816 - protein, 17 aa, Homo sapiens
CARDGPSETSQLGLDYW

SEQ ID NO: 36817 - protein, 14 aa, Homo sapiens
CAGGLGAWFGFDIW

SEQ ID NO: 36818 - protein, 20 aa, Homo sapiens
CARGPWASHTDSSGYYFDNW

SEQ ID NO: 36819 - protein, 24 aa, Homo sapiens
CAKDLRFRGLAYCSGGICPGLDYW

SEQ ID NO: 36820 - protein, 18 aa, Homo sapiens
CARGKRGYGAGYVYFDYW

SEQ ID NO: 36821 - protein, 16 aa, Homo sapiens
CARDPEYGGYSYFDSW

SEQ ID NO: 36822 - protein, 17 aa, Homo sapiens
CARDFRFGELNPGSDYW

SEQ ID NO: 36823 - protein, 19 aa, Homo sapiens
CARVVGARGYYYYNYMDVW

SEQ ID NO: 36824 - protein, 17 aa, Homo sapiens
CAKDGGVYGDYLNFDYW

SEQ ID NO: 36825 - protein, 19 aa, Homo sapiens
CAKYYYDSSGDYPYHFDYW

SEQ ID NO: 36826 - protein, 20 aa, Homo sapiens
CAREVEMATIFGGSSAFDIW

SEQ ID NO: 36827 - protein, 18 aa, Homo sapiens
CARDGFLEWVLSRAFDVW

SEQ ID NO: 36828 - protein, 23 aa, Homo sapiens
CAKDLYPLPGLLWFGEIPGFDYW

SEQ ID NO: 36829 - protein, 17 aa, Homo sapiens
CARRSRHYNSRSHFDSW

SEQ ID NO: 36830 - protein, 14 aa, Homo sapiens
CARSRVVKYAFDIW

SEQ ID NO: 36831 - protein, 17 aa, Homo sapiens
CAHRAGRWLQSGYFDLW

SEQ ID NO: 36832 - protein, 11 aa, Homo sapiens
CTTDPYYFNYW

SEQ ID NO: 36833 - protein, 12 aa, Homo sapiens
CFSYAGSYTYVF

SEQ ID NO: 36834 - protein, 22 aa, Homo sapiens
CARVGTGIEEWFQHFFYYMDVW

SEQ ID NO: 36835 - protein, 20 aa, Homo sapiens
CARLITVTLTYDPYEYFDYW

SEQ ID NO: 36836 - protein, 15 aa, Homo sapiens
CTRSTFSSSSAFDIW

SEQ ID NO: 36837 - protein, 17 aa, Homo sapiens
CARDREVGWSGYYFDYW

SEQ ID NO: 36838 - protein, 13 aa, Homo sapiens
CARGAWSKAFHIW

SEQ ID NO: 36839 - protein, 20 aa, Homo sapiens
CAKGADCSGGTCQGLRGDYW

SEQ ID NO: 36840 - protein, 17 aa, Homo sapiens
CARKAVGATYMDGFDIW

SEQ ID NO: 36841 - protein, 15 aa, Homo sapiens
CAYGQRLAAEYLQHW

SEQ ID NO: 36842 - protein, 22 aa, Homo sapiens
CARERRRHIEGDGYSPWCFDLW

SEQ ID NO: 36843 - protein, 16 aa, Homo sapiens
CVRERTKSSGWGFDYW

SEQ ID NO: 36844 - protein, 14 aa, Homo sapiens
CARLGDILTGPDYW

SEQ ID NO: 36845 - protein, 22 aa, Homo sapiens
CARGVPDGYNYLGYYYYYMDVW

SEQ ID NO: 36846 - protein, 21 aa, Homo sapiens
CARGGYCSSGTCDRSRDFDHW

SEQ ID NO: 36847 - protein, 19 aa, Homo sapiens
CARGGPGMATFRNRVFDYW

SEQ ID NO: 36848 - protein, 17 aa, Homo sapiens
CARHSWAIVGANGPDYW

SEQ ID NO: 36849 - protein, 22 aa, Homo sapiens
CVRSIPSRFYPDSSGYAIFEYW

SEQ ID NO: 36850 - protein, 17 aa, Homo sapiens
CVTPGVRYGHFSSFDYW

SEQ ID NO: 36851 - protein, 17 aa, Homo sapiens
CAKVFGWNVDQTYFDYW

SEQ ID NO: 36852 - protein, 24 aa, Homo sapiens
CGKSCNGGNCNSLGGNFYYYMDVW

SEQ ID NO: 36853 - protein, 22 aa, Homo sapiens
CVNDLGFRDTTGSSHIGYFDLW

SEQ ID NO: 36854 - protein, 15 aa, Homo sapiens
CARRRLVWVDPFDIW

SEQ ID NO: 36855 - protein, 20 aa, Homo sapiens
CARAGEDSLVRGVIKYFDSW

SEQ ID NO: 36856 - protein, 22 aa, Homo sapiens
CARHPPSYDFWSGYYGAPFDPW

SEQ ID NO: 36857 - protein, 14 aa, Homo sapiens
CANVVAGTYWFDPW

SEQ ID NO: 36858 - protein, 13 aa, Homo sapiens
CQKYISAPRSITF

SEQ ID NO: 36859 - protein, 16 aa, Homo sapiens
CVSHRDSGSWYLFDYW

SEQ ID NO: 36860 - protein, 19 aa, Homo sapiens
CARAQGAIFGVMKDPFDIW

SEQ ID NO: 36861 - protein, 21 aa, Homo sapiens
CVKNPYFDRTTYYIPYYFDYW

SEQ ID NO: 36862 - protein, 19 aa, Homo sapiens
CAIDNGLVRGNYHPWDDSW

SEQ ID NO: 36863 - protein, 16 aa, Homo sapiens
CARDAADSSGWYVDYW

SEQ ID NO: 36864 - protein, 17 aa, Homo sapiens
CVRASITATASDTFDVW

SEQ ID NO: 36865 - protein, 14 aa, Homo sapiens
CARDEGGSAWFAPW

SEQ ID NO: 36866 - protein, 16 aa, Homo sapiens
CAKDKLSAVSSPNDYW

SEQ ID NO: 36867 - protein, 20 aa, Homo sapiens
CVPRTSLNYYESNGYYTEYW

SEQ ID NO: 36868 - protein, 19 aa, Homo sapiens
CARGRHNWVAVSTDAYDIW

SEQ ID NO: 36869 - protein, 19 aa, Homo sapiens
CARDSYTIFGVAQASSDYW

SEQ ID NO: 36870 - protein, 14 aa, Homo sapiens
CARVLITSDSFDIW

SEQ ID NO: 36871 - protein, 20 aa, Homo sapiens
CVKDTGSGQGGQFYYYMDVW

SEQ ID NO: 36872 - protein, 13 aa, Homo sapiens
CAREVDYVWFGYW

SEQ ID NO: 36873 - protein, 16 aa, Homo sapiens
CARANMIMVAQGFDFW

SEQ ID NO: 36874 - protein, 20 aa, Homo sapiens
CARAPVYTRSSRPWSYLDFW

SEQ ID NO: 36875 - protein, 14 aa, Homo sapiens
CARQWGVVDAFDTW

SEQ ID NO: 36876 - protein, 13 aa, Homo sapiens
CARRWHDRVFDSW

SEQ ID NO: 36877 - protein, 13 aa, Homo sapiens
CASPLGPNSHDYW

SEQ ID NO: 36878 - protein, 18 aa, Homo sapiens
CAAARRFTGSYRDAFDIW

SEQ ID NO: 36879 - protein, 17 aa, Homo sapiens
CARTPPYGSGSYGFDYW

SEQ ID NO: 36880 - protein, 18 aa, Homo sapiens
CAKDGGLGITGTTRLDYW

SEQ ID NO: 36881 - protein, 15 aa, Homo sapiens
CARGRVSATHYIDVW

SEQ ID NO: 36882 - protein, 19 aa, Homo sapiens
CAKDPKRRDSPVVDSFDIW

SEQ ID NO: 36883 - protein, 13 aa, Homo sapiens
CTKDHRVAGFDQW

SEQ ID NO: 36884 - protein, 23 aa, Homo sapiens
CAKGGLVDFNFYQSSGHYHFDFW

SEQ ID NO: 36885 - protein, 23 aa, Homo sapiens
CARGRGTPGLTIFGVRHYYMDVW

SEQ ID NO: 36886 - protein, 16 aa, Homo sapiens
CAKDWTGYTNSGFDFW

SEQ ID NO: 36887 - protein, 13 aa, Homo sapiens
CTGGDRAYYFEFW

SEQ ID NO: 36888 - protein, 18 aa, Homo sapiens
CSRGPPYSSGWNDYFGPW

SEQ ID NO: 36889 - protein, 19 aa, Homo sapiens
CARVLESSLNYYYYYMDVW

SEQ ID NO: 36890 - protein, 12 aa, Homo sapiens
CQQFKSYVALSF

SEQ ID NO: 36891 - protein, 18 aa, Homo sapiens
CARVRIYFGEVSKWFDPW

SEQ ID NO: 36892 - protein, 19 aa, Homo sapiens
CARDFYSDDSGRLGWFDLW

SEQ ID NO: 36893 - protein, 15 aa, Homo sapiens
CAKGKRLRLGSFDYW

SEQ ID NO: 36894 - protein, 24 aa, Homo sapiens
CATLPPVSAPLRPLGPGPPRFDYW

SEQ ID NO: 36895 - protein, 14 aa, Homo sapiens
CAGQVYGYNWFDPW

SEQ ID NO: 36896 - protein, 17 aa, Homo sapiens
CARADCSSTSCSPFDYW

SEQ ID NO: 36897 - protein, 18 aa, Homo sapiens
CVRRPPWLGIREYGFDIW

SEQ ID NO: 36898 - protein, 20 aa, Homo sapiens
CGRDDFWSGNYSVTYYMDVW

SEQ ID NO: 36899 - protein, 14 aa, Homo sapiens
CAREPPSTSSFDHW

SEQ ID NO: 36900 - protein, 17 aa, Homo sapiens
CATDPPYDFWSGYSDYW

SEQ ID NO: 36901 - protein, 29 aa, Homo sapiens
CARVPLENYCPPTSCFLPNYYYYYNMDVW

SEQ ID NO: 36902 - protein, 17 aa, Homo sapiens
CTKDRDPFSSAFTFDVW

SEQ ID NO: 36903 - protein, 20 aa, Homo sapiens
CAKEGWGIAARRVAEYFQHW

SEQ ID NO: 36904 - protein, 24 aa, Homo sapiens
CARDVKDVYSYDNSAYYFRAFDIW

SEQ ID NO: 36905 - protein, 18 aa, Homo sapiens
CAKMGIRLERRFNWFDPW

SEQ ID NO: 36906 - protein, 18 aa, Homo sapiens
CARGSRGRVYATPYFDYW

SEQ ID NO: 36907 - protein, 19 aa, Homo sapiens
CARLAYCTNGVCLIYMDVW

SEQ ID NO: 36908 - protein, 20 aa, Homo sapiens
CARDPDGYDFWSGYFWFDPW

SEQ ID NO: 36909 - protein, 18 aa, Homo sapiens
CAKGHGLSAPDHRYFDSW

SEQ ID NO: 36910 - protein, 19 aa, Homo sapiens
CAKIESLEWFGGRLDFDYW

SEQ ID NO: 36911 - protein, 13 aa, Homo sapiens
CATDQIGNTFDIW

SEQ ID NO: 36912 - protein, 19 aa, Homo sapiens
CAKYNSGWFSVRIGYFDSW

SEQ ID NO: 36913 - protein, 16 aa, Homo sapiens
CARRGYSAYEYGFDSW

SEQ ID NO: 36914 - protein, 17 aa, Homo sapiens
CARGGDSGYYLNAFDVW

SEQ ID NO: 36915 - protein, 17 aa, Homo sapiens
CVRETLVAGTLGAFDLW

SEQ ID NO: 36916 - protein, 18 aa, Homo sapiens
CARDGISSDFYSGWFDPW

SEQ ID NO: 36917 - protein, 19 aa, Homo sapiens
CARKSCSSTSCKTKPFDYW

SEQ ID NO: 36918 - protein, 18 aa, Homo sapiens
CARLYVDRSGGYNPFDYW

SEQ ID NO: 36919 - protein, 19 aa, Homo sapiens
CARGNFRVVGSTTTGFDYW

SEQ ID NO: 36920 - protein, 12 aa, Homo sapiens
CARGGMTYLDVW

SEQ ID NO: 36921 - protein, 15 aa, Homo sapiens
CAKGYGYLYYYMDVW

SEQ ID NO: 36922 - protein, 19 aa, Homo sapiens
CTSRDDYDFWSGYKYIDYW

SEQ ID NO: 36923 - protein, 22 aa, Homo sapiens
CARDAISGFDYSGFYPYYFDQW

SEQ ID NO: 36924 - protein, 17 aa, Homo sapiens
CARSGGSTHYSYTSDYW

SEQ ID NO: 36925 - protein, 15 aa, Homo sapiens
CARGLYSSSWYFELW

SEQ ID NO: 36926 - protein, 14 aa, Homo sapiens
CVRYFDWIYSIDYW

SEQ ID NO: 36927 - protein, 15 aa, Homo sapiens
CARVADGYNAPLDYW

SEQ ID NO: 36928 - protein, 15 aa, Homo sapiens
CARVVIPVATRFDYW

SEQ ID NO: 36929 - protein, 16 aa, Homo sapiens
CARLGGYSYGWELDYW

SEQ ID NO: 36930 - protein, 17 aa, Homo sapiens
CTKLRAFGVVIDSFDYW

SEQ ID NO: 36931 - protein, 22 aa, Homo sapiens
CARTTLSLIPGVPPLARYFDSW

SEQ ID NO: 36932 - protein, 12 aa, Homo sapiens
CARLYNNYFDYW

SEQ ID NO: 36933 - protein, 21 aa, Homo sapiens
CARAGSHKHSDGTSSYYFDLW

SEQ ID NO: 36934 - protein, 16 aa, Homo sapiens
CAWQSSRYNLRAFDIW

SEQ ID NO: 36935 - protein, 15 aa, Homo sapiens
CARVYDYDSWYFNLW

SEQ ID NO: 36936 - protein, 15 aa, Homo sapiens
CARLAAARPYHFDYW

SEQ ID NO: 36937 - protein, 17 aa, Homo sapiens
CARLGQQLVQSKPIDYW

SEQ ID NO: 36938 - protein, 18 aa, Homo sapiens
CARGEAWSSSSLPPADYW

SEQ ID NO: 36939 - protein, 20 aa, Homo sapiens
CAKAMTFTRGFAPSDVFDVW

SEQ ID NO: 36940 - protein, 17 aa, Homo sapiens
CARHGNFVTGTTYPDYW

SEQ ID NO: 36941 - protein, 16 aa, Homo sapiens
CARVKSYNWPWSFDIW

SEQ ID NO: 36942 - protein, 21 aa, Homo sapiens
CAKLSYDYYDSSGQGSNFDYW

SEQ ID NO: 36943 - protein, 24 aa, Homo sapiens
CARDERWWGSSSVPVSPYYYMDVW

SEQ ID NO: 36944 - protein, 14 aa, Homo sapiens
CARDTSGYHLFEYW

SEQ ID NO: 36945 - protein, 17 aa, Homo sapiens
CARHGYYDTSGHYPDYW

SEQ ID NO: 36946 - protein, 18 aa, Homo sapiens
CARNWGYSSSSGSGSDYW

SEQ ID NO: 36947 - protein, 20 aa, Homo sapiens
CARRPLASTGFSGWHPFDYW

SEQ ID NO: 36948 - protein, 15 aa, Homo sapiens
CAKGRSGWFDGFDIW

SEQ ID NO: 36949 - protein, 17 aa, Homo sapiens
CARHMSLQLVGPWIDYW

SEQ ID NO: 36950 - protein, 16 aa, Homo sapiens
CARDVYSRSFYYFDFW

SEQ ID NO: 36951 - protein, 19 aa, Homo sapiens
CARRIYIATSSRNKAFDYW

SEQ ID NO: 36952 - protein, 18 aa, Homo sapiens
CARAAGYTTTWYYPFDLW

SEQ ID NO: 36953 - protein, 19 aa, Homo sapiens
CARRASTTWYGFYYYIDVW

SEQ ID NO: 36954 - protein, 18 aa, Homo sapiens
CARNRGIVGANKGEFDFW

SEQ ID NO: 36955 - protein, 16 aa, Homo sapiens
CARHRDSSDYAIFDNW

SEQ ID NO: 36956 - protein, 20 aa, Homo sapiens
CARADYDILTGSPLFFFDYW

SEQ ID NO: 36957 - protein, 14 aa, Homo sapiens
CAHRGYAENYFDFW

SEQ ID NO: 36958 - protein, 15 aa, Homo sapiens
CARHTQTVRYGFDIW

SEQ ID NO: 36959 - protein, 15 aa, Homo sapiens
CARMLHLGKLSFDYW

SEQ ID NO: 36960 - protein, 16 aa, Homo sapiens
CARDNWKYYNYYMDVW

SEQ ID NO: 36961 - protein, 20 aa, Homo sapiens
CAKDRWYDVMTGYLTYLDSW

SEQ ID NO: 36962 - protein, 18 aa, Homo sapiens
CTRFHYEDGPDLYFFDYW

SEQ ID NO: 36963 - protein, 15 aa, Homo sapiens
CARDSLYNRGRFDPW

SEQ ID NO: 36964 - protein, 24 aa, Homo sapiens
CARTPKLGKCFAPDCFAGGWFDPW

SEQ ID NO: 36965 - protein, 17 aa, Homo sapiens
CAKDVSTYYNYHYMDVW

SEQ ID NO: 36966 - protein, 19 aa, Homo sapiens
CAVFTQYYHSGGYSAFDVW

SEQ ID NO: 36967 - protein, 16 aa, Homo sapiens
CARHGSGDKYDHFDYW

SEQ ID NO: 36968 - protein, 23 aa, Homo sapiens
CARIAYLYDTNGRGSNANYFDPW

SEQ ID NO: 36969 - protein, 17 aa, Homo sapiens
CARGYDILSGYYNFDYW

SEQ ID NO: 36970 - protein, 24 aa, Homo sapiens
CARGNILGAITMRVVVITNWFDPW

SEQ ID NO: 36971 - protein, 14 aa, Homo sapiens
CATVITEHQAADYW

SEQ ID NO: 36972 - protein, 18 aa, Homo sapiens
CVRGVDYGDYLQSAFDIW

SEQ ID NO: 36973 - protein, 17 aa, Homo sapiens
CANRADRFSSSPNFDSW

SEQ ID NO: 36974 - protein, 21 aa, Homo sapiens
CAKMGVGRLEVVPHLNWFDPW

SEQ ID NO: 36975 - protein, 20 aa, Homo sapiens
CARDYTVVRELRYYYYTDVW

SEQ ID NO: 36976 - protein, 13 aa, Homo sapiens
CARIAPSRRFDFW

SEQ ID NO: 36977 - protein, 23 aa, Homo sapiens
CARETSDRSTLSAIPFLGWFDPW

SEQ ID NO: 36978 - protein, 22 aa, Homo sapiens
CARIGYCSGGSCARWGDAFDIW

SEQ ID NO: 36979 - protein, 13 aa, Homo sapiens
CARGWLRLPFDYW

SEQ ID NO: 36980 - protein, 18 aa, Homo sapiens
CAKDRHVNPKYLYYMDVW

SEQ ID NO: 36981 - protein, 16 aa, Homo sapiens
CARERSYNGNYEFDYW

SEQ ID NO: 36982 - protein, 20 aa, Homo sapiens
CARDRVEPSSPNYPYYMDVW

SEQ ID NO: 36983 - protein, 13 aa, Homo sapiens
CSRFDGWSAFDYW

SEQ ID NO: 36984 - protein, 19 aa, Homo sapiens
CARDAVAVAGTGRAYFDYW

SEQ ID NO: 36985 - protein, 16 aa, Homo sapiens
CARDLSGSLGYYFGHW

SEQ ID NO: 36986 - protein, 17 aa, Homo sapiens
CATEDIVATYYSYMDVW

SEQ ID NO: 36987 - protein, 24 aa, Homo sapiens
CARVKTLMGGVTIRYYYHYYMDVW

SEQ ID NO: 36988 - protein, 15 aa, Homo sapiens
CATVGVWDLKAFDIW

SEQ ID NO: 36989 - protein, 13 aa, Homo sapiens [sequence omitted]

SEQ ID NO: 36990 - protein, 25 aa, Homo sapiens
CARDTTATQPLWFGELLLGRPIDYW

SEQ ID NO: 36991 - protein, 17 aa, Homo sapiens
CARHKMGGQDLYAFDIW

SEQ ID NO: 36992 - protein, 14 aa, Homo sapiens
CAHSKTVTAPFDPW

SEQ ID NO: 36993 - protein, 19 aa, Homo sapiens
CARARGVAGVGTPVYMDVW

SEQ ID NO: 36994 - protein, 19 aa, Homo sapiens
CAKLLGYCSSGSCSPLDYW

SEQ ID NO: 36995 - protein, 19 aa, Homo sapiens
CTRGPSLYFDSSGSTFEYW

SEQ ID NO: 36996 - protein, 16 aa, Homo sapiens
CARDQRGSDGGALDIW

SEQ ID NO: 36997 - protein, 15 aa, Homo sapiens
CARAGYYDSSGFVYW

SEQ ID NO: 36998 - protein, 18 aa, Homo sapiens
CARGRGSRGYNYGLFDFW

SEQ ID NO: 36999 - protein, 13 aa, Homo sapiens
CARGLGSSWFASW

SEQ ID NO: 37000 - protein, 19 aa, Homo sapiens
CARGAGDYNYALDNWFDPW

SEQ ID NO: 37001 - protein, 19 aa, Homo sapiens
CARQYPGPRLRDYYYMDVW

SEQ ID NO: 37002 - protein, 24 aa, Homo sapiens
CARDSFRYDSSGYYGYYYYYMDVW

SEQ ID NO: 37003 - protein, 13 aa, Homo sapiens
CPLITMSSRGDYW

SEQ ID NO: 37004 - protein, 17 aa, Homo sapiens
CARSSTYTYFHWYFDLW

SEQ ID NO: 37005 - protein, 17 aa, Homo sapiens
CARDEYGLKWYHSFDYW

SEQ ID NO: 37006 - protein, 21 aa, Homo sapiens
CARSPRISIFGVVIPRAFDIW

SEQ ID NO: 37007 - protein, 17 aa, Homo sapiens
CARDPHADFYSYYMDVW

SEQ ID NO: 37008 - protein, 17 aa, Homo sapiens
CARTEDFYDSRGAFDIW

SEQ ID NO: 37009 - protein, 17 aa, Homo sapiens
CVKDRLGAGTGGGFDFW

SEQ ID NO: 37010 - protein, 13 aa, Homo sapiens
CARALSAGYNDHW

SEQ ID NO: 37011 - protein, 17 aa, Homo sapiens
CARRVFGSGTQGHFDSW

SEQ ID NO: 37012 - protein, 17 aa, Homo sapiens
CARMASSDTHWGYFDSW

SEQ ID NO: 37013 - protein, 26 aa, Homo sapiens
CARINIDSSAYYSLWEYYYYYYMDVW

SEQ ID NO: 37014 - protein, 21 aa, Homo sapiens
CARRSYYKLLLNYYHFYMDVW

SEQ ID NO: 37015 - protein, 15 aa, Homo sapiens
CARDREGRLQPIDYW

SEQ ID NO: 37016 - protein, 20 aa, Homo sapiens
CARDHSLGGWELLHEYFDYW

SEQ ID NO: 37017 - protein, 18 aa, Homo sapiens
CARDLLGGAGTPRAFDLW

SEQ ID NO: 37018 - protein, 17 aa, Homo sapiens
CTKGKTWTQLWPPFDFW

SEQ ID NO: 37019 - protein, 20 aa, Homo sapiens
CARVVPAAVGRAAYYYMDVW

SEQ ID NO: 37020 - protein, 14 aa, Homo sapiens
CSSFYFETSGFDYW

SEQ ID NO: 37021 - protein, 19 aa, Homo sapiens
CVKSKDGSTAAAGGSWDYW

SEQ ID NO: 37022 - protein, 13 aa, Homo sapiens
CISRSGYSGYDYW

SEQ ID NO: 37023 - protein, 20 aa, Homo sapiens
CAKDHFGSVTYFSLDALDFW

SEQ ID NO: 37024 - protein, 15 aa, Homo sapiens
CARTHSRTWDAFDIW

SEQ ID NO: 37025 - protein, 16 aa, Homo sapiens
CARDPIPGTGVYFDYW

SEQ ID NO: 37026 - protein, 19 aa, Homo sapiens
CVRHYYDSGTYYPPWFDPW

SEQ ID NO: 37027 - protein, 13 aa, Homo sapiens
CIKEETNGGADYW

SEQ ID NO: 37028 - protein, 18 aa, Homo sapiens
CARIYPYYYDSSGPIDYW

SEQ ID NO: 37029 - protein, 17 aa, Homo sapiens
CARDGYYGSGSSTPDYW

SEQ ID NO: 37030 - protein, 22 aa, Homo sapiens
CARVVTMRVPIASHPPSWFDPW

SEQ ID NO: 37031 - protein, 24 aa, Homo sapiens
CARDYQSGYFDSSGYPLGAAFDIW

SEQ ID NO: 37032 - protein, 17 aa, Homo sapiens
CARTRDYNAITGWFDPW

SEQ ID NO: 37033 - protein, 19 aa, Homo sapiens
CARGDYSSGWYSPGYFNDW

SEQ ID NO: 37034 - protein, 16 aa, Homo sapiens
CARDPIPMEGIAFDIW

SEQ ID NO: 37035 - protein, 12 aa, Homo sapiens
CLSYDSANTWIF

SEQ ID NO: 37036 - protein, 16 aa, Homo sapiens
CARDIGGGGSCDFDNW

SEQ ID NO: 37037 - protein, 15 aa, Homo sapiens
CARDYPPPYAAIDIW

SEQ ID NO: 37038 - protein, 18 aa, Homo sapiens
CAKASRSIQLWFDSFDIW

SEQ ID NO: 37039 - protein, 19 aa, Homo sapiens
CARGGGTIFGIVSDALDVW

SEQ ID NO: 37040 - protein, 21 aa, Homo sapiens
CAREPGGIWQELLRYHYMDVW

SEQ ID NO: 37041 - protein, 22 aa, Homo sapiens
CARHALGIYCSGGSCYNWFDPW

SEQ ID NO: 37042 - protein, 17 aa, Homo sapiens
CARASGSASWGDALEIW

SEQ ID NO: 37043 - protein, 11 aa, Homo sapiens
CTQATQFPYSF

SEQ ID NO: 37044 - protein, 16 aa, Homo sapiens
CATYYHDTKEMAFHIW

SEQ ID NO: 37045 - protein, 11 aa, Homo sapiens [sequence omitted]

SEQ ID NO: 37046 - protein, 19 aa, Homo sapiens
CARGKRSTLAARPPFFDYW

SEQ ID NO: 37047 - protein, 18 aa, Homo sapiens
CARHSKNGRIAAGALDYW

SEQ ID NO: 37048 - protein, 16 aa, Homo sapiens
CATGSRDVATNWFESW

SEQ ID NO: 37049 - protein, 19 aa, Homo sapiens
CARDCKTGSYPMYNCFDPW

SEQ ID NO: 37050 - protein, 20 aa, Homo sapiens
CARGCCSGGICLLGDWFDPW

SEQ ID NO: 37051 - protein, 20 aa, Homo sapiens
CARTWNGGFGDSRSNYMDVW

SEQ ID NO: 37052 - protein, 20 aa, Homo sapiens
CARHVGYCSGGSCYGAFDIW

SEQ ID NO: 37053 - protein, 19 aa, Homo sapiens
CARGGYYNSRTDYKLFDYW

SEQ ID NO: 37054 - protein, 18 aa, Homo sapiens
CTRDGAFGGVFVPGFDCW

SEQ ID NO: 37055 - protein, 16 aa, Homo sapiens
CARLQPWPPSRYMDVW

SEQ ID NO: 37056 - protein, 19 aa, Homo sapiens
CARAEYCSGGSCYGWFDPW

SEQ ID NO: 37057 - protein, 25 aa, Homo sapiens
CAREDYYDSSGYYRTYYYYYYMDVW

SEQ ID NO: 37058 - protein, 19 aa, Homo sapiens
CARHLMTVYGVTRSPFDPW

SEQ ID NO: 37059 - protein, 13 aa, Homo sapiens
CARHPAVNNFDSW

SEQ ID NO: 37060 - protein, 14 aa, Homo sapiens
CARTRTTLLEFDYW

SEQ ID NO: 37061 - protein, 16 aa, Homo sapiens
CARDELGLAAAGADYW

SEQ ID NO: 37062 - protein, 13 aa, Homo sapiens
CQSAESSGLSRVF

SEQ ID NO: 37063 - protein, 16 aa, Homo sapiens
CARDVLDLYYYYVDVW

SEQ ID NO: 37064 - protein, 19 aa, Homo sapiens
CARYYDFWSGYYMNAFDIW

SEQ ID NO: 37065 - protein, 16 aa, Homo sapiens
CARATTSSGYYLFAYW

SEQ ID NO: 37066 - protein, 16 aa, Homo sapiens
CARAITVTGQGRFDPW

SEQ ID NO: 37067 - protein, 19 aa, Homo sapiens
CAKCATNDDFWSGGWFDPW

SEQ ID NO: 37068 - protein, 22 aa, Homo sapiens
CAREDLYYDSSGYYYVEYFDYW

SEQ ID NO: 37069 - protein, 21 aa, Homo sapiens
CARDPGMYYYGSGSYGASDYW

SEQ ID NO: 37070 - protein, 16 aa, Homo sapiens
CARGISTSRGDYFDPW

SEQ ID NO: 37071 - protein, 14 aa, Homo sapiens
CARHRIATYYFESW

SEQ ID NO: 37072 - protein, 21 aa, Homo sapiens
CVRGTSCTNGVCYTQYFFDLW

SEQ ID NO: 37073 - protein, 15 aa, Homo sapiens
CARSGSGWQKTFDYW

SEQ ID NO: 37074 - protein, 13 aa, Homo sapiens
CMSSSDRPFFDYW

SEQ ID NO: 37075 - protein, 21 aa, Homo sapiens
CARLGFPGSSGSYALEAFDMW

SEQ ID NO: 37076 - protein, 23 aa, Homo sapiens
CARYRPSEYDRSGYQFSGAFHIW

SEQ ID NO: 37077 - protein, 17 aa, Homo sapiens
CARAVESGFSAYGFDPW

SEQ ID NO: 37078 - protein, 20 aa, Homo sapiens
CAHSSRARRVEMATAYFDFW

SEQ ID NO: 37079 - protein, 16 aa, Homo sapiens
CARSRHLVSDRYFALW

SEQ ID NO: 37080 - protein, 16 aa, Homo sapiens
CVRDLPPSGSYSIDYW

SEQ ID NO: 37081 - protein, 17 aa, Homo sapiens
CVREQTSHTPANWFHPW

SEQ ID NO: 37082 - protein, 15 aa, Homo sapiens [sequence omitted]

SEQ ID NO: 37083 - protein, 16 aa, Homo sapiens
CARARPRVITGFFDYW

SEQ ID NO: 37084 - protein, 13 aa, Homo sapiens
CQSYDSVNFNWVF

SEQ ID NO: 37085 - protein, 23 aa, Homo sapiens
CVRGRKPGYCTRTDCYVAPFDYW

SEQ ID NO: 37086 - protein, 22 aa, Homo sapiens
CAHSTTEMQFTFYGSGSQFDSW

SEQ ID NO: 37087 - protein, 13 aa, Homo sapiens
CARETSGEALDVW

SEQ ID NO: 37088 - protein, 22 aa, Homo sapiens
CARSMGYCSSANCYAVFGFDYW

SEQ ID NO: 37089 - protein, 19 aa, Homo sapiens
CARGLLLWAGEPPYYFDQW

SEQ ID NO: 37090 - protein, 20 aa, Homo sapiens
CARGVVVVVAASGVVWFDPW

SEQ ID NO: 37091 - protein, 20 aa, Homo sapiens
CVTVSGSGSYPGRYNWFDPW

SEQ ID NO: 37092 - protein, 18 aa, Homo sapiens
CATSPGNYYDRSGYKEYW

SEQ ID NO: 37093 - protein, 14 aa, Homo sapiens
CVRDRGGWELFDPW

SEQ ID NO: 37094 - protein, 14 aa, Homo sapiens
CSVIWLGAYAFEVW

SEQ ID NO: 37095 - protein, 19 aa, Homo sapiens
CARDPYSSGLYVHRYLDHW

SEQ ID NO: 37096 - protein, 17 aa, Homo sapiens
CAREMAASFGADAFDIW

SEQ ID NO: 37097 - protein, 22 aa, Homo sapiens
CARESFTDLDYYENSNYYEDFW

SEQ ID NO: 37098 - protein, 17 aa, Homo sapiens
CARDQAVGTYWDQFDYW

SEQ ID NO: 37099 - protein, 19 aa, Homo sapiens
CARERALEVGPRDHAFDVW

SEQ ID NO: 37100 - protein, 14 aa, Homo sapiens
CARYSWQMDAFDIW

SEQ ID NO: 37101 - protein, 16 aa, Homo sapiens
CARLQQWLEYNWFNPW

SEQ ID NO: 37102 - protein, 15 aa, Homo sapiens
CAKHPMIVVSMVDYW

SEQ ID NO: 37103 - protein, 17 aa, Homo sapiens
CARARYAGFWSGLADYW

SEQ ID NO: 37104 - protein, 18 aa, Homo sapiens
CAKGPRTTGTITGSLDYW

SEQ ID NO: 37105 - protein, 19 aa, Homo sapiens
CARGESGDYANFYYYMDVW

SEQ ID NO: 37106 - protein, 15 aa, Homo sapiens
CARPVGTTSAYFEFW

SEQ ID NO: 37107 - protein, 17 aa, Homo sapiens
CARDSGRREAAVSFDSW

SEQ ID NO: 37108 - protein, 16 aa, Homo sapiens
CAKDIWPSYYYYMDVW

SEQ ID NO: 37109 - protein, 21 aa, Homo sapiens
CVREDNDVLTGYLKYYYMDAW

SEQ ID NO: 37110 - protein, 16 aa, Homo sapiens
CTTEGTDYREYYFDNW

SEQ ID NO: 37111 - protein, 17 aa, Homo sapiens
CAKDLSMIRFNDAFDVW

SEQ ID NO: 37112 - protein, 17 aa, Homo sapiens
CARLAPSTPTTTYFDYW

SEQ ID NO: 37113 - protein, 18 aa, Homo sapiens
CARGPWDDFWSGSASDIW

SEQ ID NO: 37114 - protein, 23 aa, Homo sapiens
CARDNSHCTSTRCYFRYYYMDVW

SEQ ID NO: 37115 - protein, 19 aa, Homo sapiens
CVRDCSGGSCLSPEAFDIW

SEQ ID NO: 37116 - protein, 19 aa, Homo sapiens
CARLYYYGSGSYYLYFDYW

SEQ ID NO: 37117 - protein, 16 aa, Homo sapiens
CARDTPPGGEFYLDSW

SEQ ID NO: 37118 - protein, 26 aa, Homo sapiens
CARVWPVASITIFGVVISSGYYMDVW

SEQ ID NO: 37119 - protein, 15 aa, Homo sapiens
CARHLQQLVGWFDPW

SEQ ID NO: 37120 - protein, 18 aa, Homo sapiens
CARAPRSSGYSYYVFDYW

SEQ ID NO: 37121 - protein, 18 aa, Homo sapiens
CARQRVGMAVAEYFFDSW

SEQ ID NO: 37122 - protein, 20 aa, Homo sapiens
CARGNGSGSYYLGRNWFDPW

SEQ ID NO: 37123 - protein, 19 aa, Homo sapiens
CVGSSGVFTMVRADAFEIW

SEQ ID NO: 37124 - protein, 18 aa, Homo sapiens
CARRCSSDSCYTWAFDIW

SEQ ID NO: 37125 - protein, 15 aa, Homo sapiens
CARASDWYGRPFDFW

SEQ ID NO: 37126 - protein, 16 aa, Homo sapiens
CARLTFWSGYYQFDSW

SEQ ID NO: 37127 - protein, 18 aa, Homo sapiens
CARFRYSGSSDPWYFDYW

SEQ ID NO: 37128 - protein, 22 aa, Homo sapiens
CAREFRGPDYLTLTGQDFFDIW

SEQ ID NO: 37129 - protein, 22 aa, Homo sapiens
CAHRRGYCVGNSCTQQNWFDAW

SEQ ID NO: 37130 - protein, 18 aa, Homo sapiens
CARRASNDNGAYSWFDPW

SEQ ID NO: 37131 - protein, 24 aa, Homo sapiens
CARDSTLIPNYERSGYSLDAIDIW

SEQ ID NO: 37132 - protein, 15 aa, Homo sapiens
CARSFGVVINWFDPW

SEQ ID NO: 37133 - protein, 16 aa, Homo sapiens
CAKDRRITVIVVGDYW

SEQ ID NO: 37134 - protein, 18 aa, Homo sapiens
CARGGDSSAYYPYYFDSW

SEQ ID NO: 37135 - protein, 18 aa, Homo sapiens
CSTYYDFWSGHGRAFGYW

SEQ ID NO: 37136 - protein, 24 aa, Homo sapiens
CARAGQYCIGGTCNDDEAWYFALW

SEQ ID NO: 37137 - protein, 20 aa, Homo sapiens
CARVDCSRASCDAGGYFDPW

SEQ ID NO: 37138 - protein, 22 aa, Homo sapiens
CARGAALYGDYPARDFYYMDVW

SEQ ID NO: 37139 - protein, 18 aa, Homo sapiens
CARSVTSFSSQIDAFHFW

SEQ ID NO: 37140 - protein, 18 aa, Homo sapiens
CARDDTYRGVLSYYFDYW

SEQ ID NO: 37141 - protein, 17 aa, Homo sapiens
CARDFNKYTVTGASDIW

SEQ ID NO: 37142 - protein, 18 aa, Homo sapiens
CARGKSSSGWSPYYLDYW

SEQ ID NO: 37143 - protein, 23 aa, Homo sapiens
CARERRDYYDSVGYAGAAALDVW

SEQ ID NO: 37144 - protein, 16 aa, Homo sapiens
CSTYYDFWSAFYTDYW

SEQ ID NO: 37145 - protein, 17 aa, Homo sapiens
CARVSGSDYFDDPFDMW

SEQ ID NO: 37146 - protein, 19 aa, Homo sapiens
CAKDMVYSSARAGNWFDSW

SEQ ID NO: 37147 - protein, 16 aa, Homo sapiens
CARDSTNGVSYLFDHW

SEQ ID NO: 37148 - protein, 15 aa, Homo sapiens
CVKDGNSWYRSFDYW

SEQ ID NO: 37149 - protein, 19 aa, Homo sapiens
CAHAYDYVWGSSLYYFDYW

SEQ ID NO: 37150 - protein, 17 aa, Homo sapiens
CARDPGNVEIRGFFDSW

SEQ ID NO: 37151 - protein, 24 aa, Homo sapiens
CARAPRYCNSASCFNVYLYYMDVW

SEQ ID NO: 37152 - protein, 24 aa, Homo sapiens
CATDHPRYEVLYGGYVYSYYMDVW

SEQ ID NO: 37153 - protein, 13 aa, Homo sapiens
CAMTTNYYYVDVW

SEQ ID NO: 37154 - protein, 13 aa, Homo sapiens
CARTYSGYDFAYW

SEQ ID NO: 37155 - protein, 21 aa, Homo sapiens
CARGTIRDSRGYLGGRWFDPW

SEQ ID NO: 37156 - protein, 23 aa, Homo sapiens
CAKDGGLREVVTAITYYYYMDVW

SEQ ID NO: 37157 - protein, 15 aa, Homo sapiens
CATAPEDGDDAFHIW

SEQ ID NO: 37158 - protein, 12 aa, Homo sapiens
CASRLAANFDYW

SEQ ID NO: 37159 - protein, 12 aa, Homo sapiens
CQRRSNWLMYTF

SEQ ID NO: 37160 - protein, 14 aa, Homo sapiens
CAAIVGVVDAFDIW

SEQ ID NO: 37161 - protein, 15 aa, Homo sapiens
CARSDHWHYGAFDIW

SEQ ID NO: 37162 - protein, 24 aa, Homo sapiens
CARNVMITFGGVIVKDYYYYMDVW

SEQ ID NO: 37163 - protein, 17 aa, Homo sapiens
CARDPSETVAEAYFDYW

SEQ ID NO: 37164 - protein, 23 aa, Homo sapiens
CARGQFHSESGVYIGGYYYMDVW

SEQ ID NO: 37165 - protein, 17 aa, Homo sapiens
CVTGDIQEGHYYYMDAW

SEQ ID NO: 37166 - protein, 17 aa, Homo sapiens
CVKQSRAVAGRVILDYW

SEQ ID NO: 37167 - protein, 15 aa, Homo sapiens
CARGSRLGELGFDYW

SEQ ID NO: 37168 - protein, 18 aa, Homo sapiens
CARDVPNYEESRGYWDHW

SEQ ID NO: 37169 - protein, 17 aa, Homo sapiens
CARDRIQLWLQGLPDYW

SEQ ID NO: 37170 - protein, 13 aa, Homo sapiens
CESRDSSGRVLIF

SEQ ID NO: 37171 - protein, 13 aa, Homo sapiens
CAVGRWPYYLDFW

SEQ ID NO: 37172 - protein, 19 aa, Homo sapiens
CATEERDKKVAVSGAFDIW

SEQ ID NO: 37173 - protein, 14 aa, Homo sapiens
CARGYNYGRHFDYW

SEQ ID NO: 37174 - protein, 17 aa, Homo sapiens
CAKSKWSEQTGGPFDVW

SEQ ID NO: 37175 - protein, 17 aa, Homo sapiens
CAKAIPGYGGNFAFDYW

SEQ ID NO: 37176 - protein, 17 aa, Homo sapiens
CAKDGVPSVRQWFFDYW

SEQ ID NO: 37177 - protein, 15 aa, Homo sapiens [sequence omitted]

SEQ ID NO: 37178 - protein, 17 aa, Homo sapiens
CARHLGGYEFYFYMDVW

SEQ ID NO: 37179 - protein, 19 aa, Homo sapiens
CARAATRVPGSLPRAFDIW

SEQ ID NO: 37180 - protein, 14 aa, Homo sapiens
CTTSEAWELRFDSW

SEQ ID NO: 37181 - protein, 16 aa, Homo sapiens
CARDPVGQLAYHFDLW

SEQ ID NO: 37182 - protein, 17 aa, Homo sapiens
CARTTDTTRVYYYMDAW

SEQ ID NO: 37183 - protein, 18 aa, Homo sapiens
CARGGKNISLRRARFDYW

SEQ ID NO: 37184 - protein, 13 aa, Homo sapiens
CARLREWLPLDYW

SEQ ID NO: 37185 - protein, 16 aa, Homo sapiens
CARPLRGGVNDGYDVW

SEQ ID NO: 37186 - protein, 19 aa, Homo sapiens
CAREGSGTYSQVSTFFDYW

SEQ ID NO: 37187 - protein, 20 aa, Homo sapiens
CARDSVSRGSGWFGDYFDYW

SEQ ID NO: 37188 - protein, 21 aa, Homo sapiens
CARGRYDYVWGSYRYTRFDYW

SEQ ID NO: 37189 - protein, 21 aa, Homo sapiens
CVREGGNTRSWYPRGWHFDLW

SEQ ID NO: 37190 - protein, 14 aa, Homo sapiens
CARANGYPWDFDFW

SEQ ID NO: 37191 - protein, 20 aa, Homo sapiens
CARGFRNGYYYGSGSTFDYW

SEQ ID NO: 37192 - protein, 14 aa, Homo sapiens
CARYQLRSHAFDVW

SEQ ID NO: 37193 - protein, 19 aa, Homo sapiens
CATLALRPNNYYYYYMDVW

SEQ ID NO: 37194 - protein, 22 aa, Homo sapiens
CARDAGAKIRILKWLYAGFDMW

SEQ ID NO: 37195 - protein, 17 aa, Homo sapiens
CAKEDANSYGDDAFDIW

SEQ ID NO: 37196 - protein, 19 aa, Homo sapiens
CAKGLAGTNYYAPWWFDPW

SEQ ID NO: 37197 - protein, 14 aa, Homo sapiens
CARDYGGKTEFDHW

SEQ ID NO: 37198 - protein, 17 aa, Homo sapiens
CARPLEGAATPRSFDIW

SEQ ID NO: 37199 - protein, 24 aa, Homo sapiens
CARVPSVYSSGWYFEPVVVGFDPW

SEQ ID NO: 37200 - protein, 17 aa, Homo sapiens
CARDPSRDGYIRDDDYW

SEQ ID NO: 37201 - protein, 20 aa, Homo sapiens
CAKDVGPKTSGWYPVVFDSW

SEQ ID NO: 37202 - protein, 22 aa, Homo sapiens
CARTQSLYCNGGSCYSYYFDYW

SEQ ID NO: 37203 - protein, 18 aa, Homo sapiens
CARHLRDCGGDCSALDYW

SEQ ID NO: 37204 - protein, 18 aa, Homo sapiens
CARAYGISATTTDAFDIW

SEQ ID NO: 37205 - protein, 23 aa, Homo sapiens
CVTYYDSGSYHNGGGSLYYYDSW

SEQ ID NO: 37206 - protein, 14 aa, Homo sapiens
CARSRSNDNYMDVW

SEQ ID NO: 37207 - protein, 21 aa, Homo sapiens
CARLYGEYPAGYYYYYYMDVW

SEQ ID NO: 37208 - protein, 20 aa, Homo sapiens
CARGGAWLTVFGADFYMDVW

SEQ ID NO: 37209 - protein, 20 aa, Homo sapiens
CARGKTYYYESSTFYPPDYW

SEQ ID NO: 37210 - protein, 16 aa, Homo sapiens
CARCGVGYGDCFFDSW

SEQ ID NO: 37211 - protein, 21 aa, Homo sapiens
CARDPSCTSCYHAYYYYMDVW

SEQ ID NO: 37212 - protein, 23 aa, Homo sapiens
CAKSRSSSSSWYWAYYYYYMDVW

SEQ ID NO: 37213 - protein, 22 aa, Homo sapiens
CVRALSDYVWGSYRSNLYFDYW

SEQ ID NO: 37214 - protein, 18 aa, Homo sapiens
CAKSRGRGDYDYRTFDQW

SEQ ID NO: 37215 - protein, 22 aa, Homo sapiens
CARAPYYFDSSGYFPHWYFDLW

SEQ ID NO: 37216 - protein, 24 aa, Homo sapiens
CARARVTSRSLVTRRDRHAPFDMW

SEQ ID NO: 37217 - protein, 21 aa, Homo sapiens
CARRPGYCSSTSCSNYYFDIW

SEQ ID NO: 37218 - protein, 19 aa, Homo sapiens
CTRPAPDCSSLSCYYFQHW

SEQ ID NO: 37219 - protein, 19 aa, Homo sapiens
CARSFYFVSTSGRPNFDYW

SEQ ID NO: 37220 - protein, 15 aa, Homo sapiens
CARGPPTGVDWFDPW

SEQ ID NO: 37221 - protein, 22 aa, Homo sapiens
CARDGAYCGGDCRYWDWHFDLW

SEQ ID NO: 37222 - protein, 22 aa, Homo sapiens
CARAVRGVTLPYYYYYYGMDVW

SEQ ID NO: 37223 - protein, 18 aa, Homo sapiens
CTSDSTYSSGWHDAFEIW

SEQ ID NO: 37224 - protein, 21 aa, Homo sapiens
CARSPITMIVVVIKYWYFDLW

SEQ ID NO: 37225 - protein, 14 aa, Homo sapiens
CANTYNSGWDFDQW

SEQ ID NO: 37226 - protein, 12 aa, Homo sapiens
CAKETTESFDFW

SEQ ID NO: 37227 - protein, 17 aa, Homo sapiens
CARVRRITMIVNAFDVW

SEQ ID NO: 37228 - protein, 19 aa, Homo sapiens
CAKENGERRHWADNWFDPW

SEQ ID NO: 37229 - protein, 14 aa, Homo sapiens
CASRGLSGDAFDLW

SEQ ID NO: 37230 - protein, 17 aa, Homo sapiens
CARDHGSGWTDWYFDLW

SEQ ID NO: 37231 - protein, 19 aa, Homo sapiens
CARHATFQGYSGYDAFEIW

SEQ ID NO: 37232 - protein, 20 aa, Homo sapiens
CARRQKIWLEYGVAWPFDLW

SEQ ID NO: 37233 - protein, 18 aa, Homo sapiens
CASVSTVEGYSYFYLDVW

SEQ ID NO: 37234 - protein, 16 aa, Homo sapiens
CVKDRYSSGPDAFDIW

SEQ ID NO: 37235 - protein, 18 aa, Homo sapiens
CARGLMTMVTAPNCFDPW

SEQ ID NO: 37236 - protein, 16 aa, Homo sapiens
CAKKPSVGTYYYFDYW

SEQ ID NO: 37237 - protein, 17 aa, Homo sapiens
CARADWSFVDPYYFDYW

SEQ ID NO: 37238 - protein, 19 aa, Homo sapiens
CARHTRDNGDYSAWFFDYW

SEQ ID NO: 37239 - protein, 28 aa, Homo sapiens
CARDRPYYWDINGSYRGSHYYFYYLDVW

SEQ ID NO: 37240 - protein, 17 aa, Homo sapiens
CATGYCSSSNCYLFDYW

SEQ ID NO: 37241 - protein, 15 aa, Homo sapiens
CAREPGSGWNRFDPW

SEQ ID NO: 37242 - protein, 17 aa, Homo sapiens
CASTPRRWLQLGAFDIW

SEQ ID NO: 37243 - protein, 19 aa, Homo sapiens
CAKDSWSSSWYSNGYFDYW

SEQ ID NO: 37244 - protein, 21 aa, Homo sapiens
CVTENIAAPSRVRWPRAFDIW

SEQ ID NO: 37245 - protein, 16 aa, Homo sapiens
CASYYYDSGRYYADYW

SEQ ID NO: 37246 - protein, 19 aa, Homo sapiens
CARHDRRWLQPSPYYFDYW

SEQ ID NO: 37247 - protein, 19 aa, Homo sapiens
CATRVAYYYDSSGHYFNYW

SEQ ID NO: 37248 - protein, 20 aa, Homo sapiens
CARWHCSTRSCYTPEWLDPW

SEQ ID NO: 37249 - protein, 21 aa, Homo sapiens
CTRENCSSSGYCSGPGAFDIW

SEQ ID NO: 37250 - protein, 18 aa, Homo sapiens
CARPDGSGWYVGFRFDHW

SEQ ID NO: 37251 - protein, 17 aa, Homo sapiens
CARHRRSGGPHYYFDYW

SEQ ID NO: 37252 - protein, 19 aa, Homo sapiens
CARDHAFRDDYSWGAFDIW

SEQ ID NO: 37253 - protein, 12 aa, Homo sapiens
CAKDPPIAFHVW

SEQ ID NO: 37254 - protein, 14 aa, Homo sapiens
CARGSITSGSLDYW

SEQ ID NO: 37255 - protein, 17 aa, Homo sapiens
CTRDVPYNDFQDAFDIW

SEQ ID NO: 37256 - protein, 13 aa, Homo sapiens
CARLLGGGWIDPW

SEQ ID NO: 37257 - protein, 17 aa, Homo sapiens
CANGGTYGDYTGPFEYW

SEQ ID NO: 37258 - protein, 16 aa, Homo sapiens
CARVPMHKGDYIFDLW

SEQ ID NO: 37259 - protein, 21 aa, Homo sapiens
CTRERRYSSSWYVEACWFDPW

SEQ ID NO: 37260 - protein, 22 aa, Homo sapiens
CTRVGLCGGDSCSSQSRNFDYW

SEQ ID NO: 37261 - protein, 20 aa, Homo sapiens
CARGGYYDRSGYSHDAFDVW

SEQ ID NO: 37262 - protein, 15 aa, Homo sapiens
CAKDQGVFVWSLDYW

SEQ ID NO: 37263 - protein, 14 aa, Homo sapiens
CARSQYTFRPFDYW

SEQ ID NO: 37264 - protein, 23 aa, Homo sapiens
CARQKPERLLWVADFFPSYLDFW

SEQ ID NO: 37265 - protein, 16 aa, Homo sapiens
CARLGGSYRDSAFDLW

SEQ ID NO: 37266 - protein, 23 aa, Homo sapiens
CARSPAYCSGGSCYRGYWYFDLW

SEQ ID NO: 37267 - protein, 17 aa, Homo sapiens
CARVLWEQYKYYYMDVW

SEQ ID NO: 37268 - protein, 22 aa, Homo sapiens
CAGYCSSTSCPTGGYYYYMDVW

SEQ ID NO: 37269 - protein, 13 aa, Homo sapiens
CQQYNNRPRKPTF

SEQ ID NO: 37270 - protein, 18 aa, Homo sapiens
CARHGRLVSGHPPHFDYW

SEQ ID NO: 37271 - protein, 18 aa, Homo sapiens
CARGPYAYESSGSWFDLW

SEQ ID NO: 37272 - protein, 11 aa, Homo sapiens
CETWDTNSKVF

SEQ ID NO: 37273 - protein, 19 aa, Homo sapiens
CARGPPRYCRDSNCYPDYW

SEQ ID NO: 37274 - protein, 14 aa, Homo sapiens
CARRSHSPYSFDYW

SEQ ID NO: 37275 - protein, 17 aa, Homo sapiens
CARAYTSSSGKHAFDIW

SEQ ID NO: 37276 - protein, 16 aa, Homo sapiens
CVRVFAVGGPGWFDPW

SEQ ID NO: 37277 - protein, 21 aa, Homo sapiens
CARDNGFNYDYVWGSYRLDYW

SEQ ID NO: 37278 - protein, 19 aa, Homo sapiens
CARGQVGFGELLYTTFDYW

SEQ ID NO: 37279 - protein, 15 aa, Homo sapiens
CARIEMGMFSHIDYW

SEQ ID NO: 37280 - protein, 15 aa, Homo sapiens
CARVLQVVPHAFDVW

SEQ ID NO: 37281 - protein, 17 aa, Homo sapiens
CARDPTLSAAGYYFDSW

SEQ ID NO: 37282 - protein, 18 aa, Homo sapiens
CGGDCSRPSDFYYYMDVW

SEQ ID NO: 37283 - protein, 15 aa, Homo sapiens
CATGYSYGDDAFDIW

SEQ ID NO: 37284 - protein, 18 aa, Homo sapiens
CAGGFIASIGTGDDLDIW

SEQ ID NO: 37285 - protein, 16 aa, Homo sapiens
CARGEMATIWGRFDPW

SEQ ID NO: 37286 - protein, 17 aa, Homo sapiens
CASSFGSGGYYYWFDPW

SEQ ID NO: 37287 - protein, 20 aa, Homo sapiens
CARDGRDDNGGNSGNALDIW

SEQ ID NO: 37288 - protein, 16 aa, Homo sapiens
CARDDLELYLYYFDYW

SEQ ID NO: 37289 - protein, 19 aa, Homo sapiens
CVRVYYYDGSGYSDGFDPW

SEQ ID NO: 37290 - protein, 18 aa, Homo sapiens
CAKDGSFFVPAAKQFDYW

SEQ ID NO: 37291 - protein, 21 aa, Homo sapiens
CARSPPYCTDGLCFANTFAYW

SEQ ID NO: 37292 - protein, 19 aa, Homo sapiens
CARIMRNTVSTPDEGFDPW

SEQ ID NO: 37293 - protein, 22 aa, Homo sapiens
CARGGGFDSSGYYYEFRTFDYW

SEQ ID NO: 37294 - protein, 15 aa, Homo sapiens
CASSSSWYSHYMDVW

SEQ ID NO: 37295 - protein, 18 aa, Homo sapiens
CALAYSDSWYTDPYFDSW

SEQ ID NO: 37296 - protein, 15 aa, Homo sapiens
CTTENVDMSTVFGYW

SEQ ID NO: 37297 - protein, 18 aa, Homo sapiens
CAKEGKRYPSDSGGFDYW

SEQ ID NO: 37298 - protein, 19 aa, Homo sapiens
CARSVMTVLPATPGAFDVW

SEQ ID NO: 37299 - protein, 20 aa, Homo sapiens
CARNGVVVRLHLTYDAFDLW

SEQ ID NO: 37300 - protein, 15 aa, Homo sapiens
CARSMAMIRGVLDYW

SEQ ID NO: 37301 - protein, 17 aa, Homo sapiens
CARHTLFYDSWYYFDYW

SEQ ID NO: 37302 - protein, 18 aa, Homo sapiens
CARDRDQNSWGLDAFDIW

SEQ ID NO: 37303 - protein, 18 aa, Homo sapiens
CARDHADYYDSPGWFDPW

SEQ ID NO: 37304 - protein, 22 aa, Homo sapiens
CARTTYYYAGGGQIEYWYSDLW

SEQ ID NO: 37305 - protein, 19 aa, Homo sapiens
CVKDPHYGSGTYLGYFDYW

SEQ ID NO: 37306 - protein, 17 aa, Homo sapiens
CAKGGSGNYGEYFFDHW

SEQ ID NO: 37307 - protein, 15 aa, Homo sapiens
CARLLWFGELLLDYW

SEQ ID NO: 37308 - protein, 24 aa, Homo sapiens
CARVGLYQDSSGYFSGDYYYMDVW

SEQ ID NO: 37309 - protein, 14 aa, Homo sapiens
CAKALDYGRHFDYW

SEQ ID NO: 37310 - protein, 23 aa, Homo sapiens
CARTGGSIGYGAYFDYYYYMDVW

SEQ ID NO: 37311 - protein, 19 aa, Homo sapiens
CATASAADTAMLLYYFHYW

SEQ ID NO: 37312 - protein, 14 aa, Homo sapiens
CARDVGYYDAFDMW

SEQ ID NO: 37313 - protein, 20 aa, Homo sapiens
CATLLSRGYSGYDYTYFDSW

SEQ ID NO: 37314 - protein, 15 aa, Homo sapiens
CARDGRIAVAGFDYW

SEQ ID NO: 37315 - protein, 24 aa, Homo sapiens
CTRLYYDYIWGTYRPKEGYYFDYW

SEQ ID NO: 37316 - protein, 12 aa, Homo sapiens
CSSSGCYGLDYW

SEQ ID NO: 37317 - protein, 20 aa, Homo sapiens
CARLLSGYSNSRPEPDLDYW

SEQ ID NO: 37318 - protein, 17 aa, Homo sapiens
CAAPRRGSKLEGTFDYW

SEQ ID NO: 37319 - protein, 18 aa, Homo sapiens
CAKNGLYGDVTETYLDPW

SEQ ID NO: 37320 - protein, 20 aa, Homo sapiens
CAIPRIPGYSYGYPSEFEYW

SEQ ID NO: 37321 - protein, 16 aa, Homo sapiens
CARVTPPHNWANFDSW

SEQ ID NO: 37322 - protein, 10 aa, Homo sapiens [sequence omitted]

SEQ ID NO: 37323 - protein, 17 aa, Homo sapiens
CARRSVALPAARLLDYW

SEQ ID NO: 37324 - protein, 17 aa, Homo sapiens
CARTQRGRPRGFLFDNW

SEQ ID NO: 37325 - protein, 20 aa, Homo sapiens
CARQSPNRWLQSQGDAFDIW

SEQ ID NO: 37326 - protein, 16 aa, Homo sapiens
CVKDSWKGLFYYMDVW

SEQ ID NO: 37327 - protein, 13 aa, Homo sapiens
CSLGAGRTPLDYW

SEQ ID NO: 37328 - protein, 18 aa, Homo sapiens
CASQGSSGWYSLSAFDIW

SEQ ID NO: 37329 - protein, 16 aa, Homo sapiens
CARHGYDGAWERFDYW

SEQ ID NO: 37330 - protein, 18 aa, Homo sapiens
CARAYNWNGNPYYYMDVW

SEQ ID NO: 37331 - protein, 15 aa, Homo sapiens
CARDLFTGTGWFDSW

SEQ ID NO: 37332 - protein, 12 aa, Homo sapiens
CQVWESSSDPSF

SEQ ID NO: 37333 - protein, 14 aa, Homo sapiens
CQSGVSSGPYDYVF

SEQ ID NO: 37334 - protein, 14 aa, Homo sapiens
CARVRMASNWLDPW

SEQ ID NO: 37335 - protein, 19 aa, Homo sapiens
CAREARTGLAVGGDRFDPW

SEQ ID NO: 37336 - protein, 29 aa, Homo sapiens
CARDSHYYDILTGWGWNQDYYYYYYMDVW

SEQ ID NO: 37337 - protein, 19 aa, Homo sapiens
CAKGVVPFLEWSHDAFHTW

SEQ ID NO: 37338 - protein, 15 aa, Homo sapiens
CASQFGELLYAVDYW

SEQ ID NO: 37339 - protein, 22 aa, Homo sapiens
CARMTVDTALLYYYYYYYMDVW

SEQ ID NO: 37340 - protein, 21 aa, Homo sapiens
CARDDSSDWYRTYDFYYLDVW

SEQ ID NO: 37341 - protein, 22 aa, Homo sapiens
CARAPRVYHNGGFYYAGAFDVW

SEQ ID NO: 37342 - protein, 19 aa, Homo sapiens
CARAGFSSAWYRDESFDSW

SEQ ID NO: 37343 - protein, 15 aa, Homo sapiens
CAREIPGGSSFFDYW

SEQ ID NO: 37344 - protein, 18 aa, Homo sapiens
CAKPLVPATRFAEYFQHW

SEQ ID NO: 37345 - protein, 15 aa, Homo sapiens
CTTDPSDILTHFDYW

SEQ ID NO: 37346 - protein, 19 aa, Homo sapiens
CARVSDYSSSWVHPVFDYW

SEQ ID NO: 37347 - protein, 21 aa, Homo sapiens
CARDGWSVTTSDRQKTWFDPW

SEQ ID NO: 37348 - protein, 22 aa, Homo sapiens
CARGLYYFDGSNPRDHWYFGLW

SEQ ID NO: 37349 - protein, 14 aa, Homo sapiens
CARGGSGWSSFDYW

SEQ ID NO: 37350 - protein, 16 aa, Homo sapiens
CARHLISTGTFSFDLW

SEQ ID NO: 37351 - protein, 14 aa, Homo sapiens
CAAWDDSLPAHWAF

SEQ ID NO: 37352 - protein, 25 aa, Homo sapiens
CAHRVVPAALDPWMTAPASDAFDIW

SEQ ID NO: 37353 - protein, 17 aa, Homo sapiens
CARKVALTTWEGWFDPW

SEQ ID NO: 37354 - protein, 14 aa, Homo sapiens
CARLRYRDYGNDYW

SEQ ID NO: 37355 - protein, 24 aa, Homo sapiens
CAKVPLRGYDILTGYYLVFYFDYW

SEQ ID NO: 37356 - protein, 16 aa, Homo sapiens
CARVDSLAYYAGYDYW

SEQ ID NO: 37357 - protein, 20 aa, Homo sapiens
CARELHGGNSRWNYYYMDVW

SEQ ID NO: 37358 - protein, 15 aa, Homo sapiens
CARAVYSSSLAFDIW

SEQ ID NO: 37359 - protein, 17 aa, Homo sapiens
CTRAVGDSSRWIVLDYW

SEQ ID NO: 37360 - protein, 19 aa, Homo sapiens
CARGDYDFWSGHSNYFDYW

SEQ ID NO: 37361 - protein, 17 aa, Homo sapiens
CARHWATAAGLRWFDPW

SEQ ID NO: 37362 - protein, 16 aa, Homo sapiens
CARDPRFNWNYPFDYW

SEQ ID NO: 37363 - protein, 15 aa, Homo sapiens
CARLNSIAISAFDFW

SEQ ID NO: 37364 - protein, 26 aa, Homo sapiens
CARAQGPRVHYDFWSGYGGPYHFDFW

SEQ ID NO: 37365 - protein, 17 aa, Homo sapiens
CARMSSTATKWGYFDFW

SEQ ID NO: 37366 - protein, 15 aa, Homo sapiens
CAKDIIEPGLHFDYW

SEQ ID NO: 37367 - protein, 18 aa, Homo sapiens
CARDGGYSGYDASSIDYW

SEQ ID NO: 37368 - protein, 14 aa, Homo sapiens
CALGTLERVVFDIW

SEQ ID NO: 37369 - protein, 18 aa, Homo sapiens
CVRAPVEYTYGPLIIDYW

SEQ ID NO: 37370 - protein, 17 aa, Homo sapiens
CARVVVPGTFAEYFHSW

SEQ ID NO: 37371 - protein, 17 aa, Homo sapiens
CTKSGVRRTNFDWFDPW

SEQ ID NO: 37372 - protein, 14 aa, Homo sapiens
CAKRGWLHDYFESW

SEQ ID NO: 37373 - protein, 21 aa, Homo sapiens
CAREISCYNYESSGYCYFDSW

SEQ ID NO: 37374 - protein, 19 aa, Homo sapiens
CARILGRTGPAHSDGLDIW

SEQ ID NO: 37375 - protein, 24 aa, Homo sapiens
CAKGREYCSSTSCYRYYYYYMDVW

SEQ ID NO: 37376 - protein, 12 aa, Homo sapiens
CQQRGHWPPFSF

SEQ ID NO: 37377 - protein, 15 aa, Homo sapiens
CIAQFTGWDDYFEYW

SEQ ID NO: 37378 - protein, 17 aa, Homo sapiens
CARRFWSGHYPGWLDPW

SEQ ID NO: 37379 - protein, 21 aa, Homo sapiens
CAKVARDAAMSYYHYYYMDVW

SEQ ID NO: 37380 - protein, 18 aa, Homo sapiens
CARVPMISGWYFDAYDVW

SEQ ID NO: 37381 - protein, 14 aa, Homo sapiens [sequence omitted]

SEQ ID NO: 37382 - protein, 18 aa, Homo sapiens
CARQSPGGWQLGNWFDPW

SEQ ID NO: 37383 - protein, 18 aa, Homo sapiens
CARGPPIGYDSSGYFLHW

SEQ ID NO: 37384 - protein, 23 aa, Homo sapiens
CARTTVARGVIAKGYHYYYLDVW

SEQ ID NO: 37385 - protein, 15 aa, Homo sapiens
CARGGLTAVSAFDVW

SEQ ID NO: 37386 - protein, 21 aa, Homo sapiens
CARGGILQYLFQALRGGFDYW

SEQ ID NO: 37387 - protein, 17 aa, Homo sapiens
CAKLPSGSGWPEPFDFW

SEQ ID NO: 37388 - protein, 15 aa, Homo sapiens
CAIVSNSVTYPFGYW

SEQ ID NO: 37389 - protein, 25 aa, Homo sapiens
CARGLRTYYYDSSGYSSYYYYMDVW

SEQ ID NO: 37390 - protein, 19 aa, Homo sapiens
CARDVKYSSSSAYADLDYW

SEQ ID NO: 37391 - protein, 20 aa, Homo sapiens
CAGQSRSYYGRIYYYYMDVW

SEQ ID NO: 37392 - protein, 14 aa, Homo sapiens
CARELADSYQFDFW

SEQ ID NO: 37393 - protein, 17 aa, Homo sapiens
CTRRPFDYDDNNVFDMW

SEQ ID NO: 37394 - protein, 20 aa, Homo sapiens
CARVGYTDYVFGQYYYMDVW

SEQ ID NO: 37395 - protein, 17 aa, Homo sapiens
CARSTSSWPSYWFFDLW

SEQ ID NO: 37396 - protein, 17 aa, Homo sapiens
CVRGINDNNDRYWFDLW

SEQ ID NO: 37397 - protein, 18 aa, Homo sapiens
CARDVFRGPAAIDALDLW

SEQ ID NO: 37398 - protein, 18 aa, Homo sapiens
CASEYSSSPGPYYYMDVW

SEQ ID NO: 37399 - protein, 23 aa, Homo sapiens
CARDALFYYYDSGGFYPYYYDYW

SEQ ID NO: 37400 - protein, 17 aa, Homo sapiens
CASSRLIAVADGTLDYW

SEQ ID NO: 37401 - protein, 19 aa, Homo sapiens
CARESGTSWSLGNWFFDLW

SEQ ID NO: 37402 - protein, 16 aa, Homo sapiens
CARGASSSRGYSYDYW

SEQ ID NO: 37403 - protein, 18 aa, Homo sapiens
CASLPPGPYSGSKEFDSW

SEQ ID NO: 37404 - protein, 17 aa, Homo sapiens
CAKDIASTMESNGFQSW

SEQ ID NO: 37405 - protein, 18 aa, Homo sapiens
CARGMLSDGWYLHVFDIW

SEQ ID NO: 37406 - protein, 17 aa, Homo sapiens
CARENLGVTATRAFDIW

SEQ ID NO: 37407 - protein, 22 aa, Homo sapiens
CAGMWYDILTDNKWGRDWFDPW

SEQ ID NO: 37408 - protein, 22 aa, Homo sapiens
CARMQYSSSSFTPYHYYYMDVW

SEQ ID NO: 37409 - protein, 17 aa, Homo sapiens
CARDGRSGYHMGWFDPW

SEQ ID NO: 37410 - protein, 17 aa, Homo sapiens
CAVSVIVASQTRSFDVW

SEQ ID NO: 37411 - protein, 15 aa, Homo sapiens
CAKDLGDSSGPFDYW

SEQ ID NO: 37412 - protein, 26 aa, Homo sapiens
CARDGGSCSGGSCYSETRGDYFFDSW

SEQ ID NO: 37413 - protein, 15 aa, Homo sapiens
CARSYYSSGSYMDIW

SEQ ID NO: 37414 - protein, 17 aa, Homo sapiens
CARGGGPIAAADQFDYW

SEQ ID NO: 37415 - protein, 17 aa, Homo sapiens
CVHDCSGGDCSYHFDYW

SEQ ID NO: 37416 - protein, 21 aa, Homo sapiens
CAREDYRFGDKGNFYYYMDVW

SEQ ID NO: 37417 - protein, 16 aa, Homo sapiens
CARYSPATITFGFDIW

SEQ ID NO: 37418 - protein, 14 aa, Homo sapiens
CQSADSSDIRYEVF

SEQ ID NO: 37419 - protein, 13 aa, Homo sapiens
CHSADSTGTYLGF

SEQ ID NO: 37420 - protein, 19 aa, Homo sapiens
CARGGDYGDVLQADAFDIW

SEQ ID NO: 37421 - protein, 16 aa, Homo sapiens
CAHRQVGSGWVLFGYW

SEQ ID NO: 37422 - protein, 19 aa, Homo sapiens
CASSIVGAVYGYCYYMDVW

SEQ ID NO: 37423 - protein, 15 aa, Homo sapiens
CVGVEVAGSSPLDYW

SEQ ID NO: 37424 - protein, 21 aa, Homo sapiens
CARENYYDSSGYIGVNAFDIW

SEQ ID NO: 37425 - protein, 15 aa, Homo sapiens
CARAAQGGYGDFDDW

SEQ ID NO: 37426 - protein, 17 aa, Homo sapiens
CARDIAVAGTDDAFDIW

SEQ ID NO: 37427 - protein, 15 aa, Homo sapiens
CATGISGLTNAFEIW

SEQ ID NO: 37428 - protein, 14 aa, Homo sapiens
CARDFIVSGRFDSW

SEQ ID NO: 37429 - protein, 21 aa, Homo sapiens
CARDTYNWNYSGYYYYYMDVW

SEQ ID NO: 37430 - protein, 24 aa, Homo sapiens
CAREEAFLTYDFWADRGSNWFDPW

SEQ ID NO: 37431 - protein, 18 aa, Homo sapiens
CTRRYYHDSSGYYQSDYW

SEQ ID NO: 37432 - protein, 14 aa, Homo sapiens
CARDWSGSYWLDYW

SEQ ID NO: 37433 - protein, 14 aa, Homo sapiens
CAREGRIGEAFDSW

SEQ ID NO: 37434 - protein, 20 aa, Homo sapiens
CARECGGDCQSPNYYYMDVW

SEQ ID NO: 37435 - protein, 22 aa, Homo sapiens
CARDGKYRFLESDHYHSYMDVW

SEQ ID NO: 37436 - protein, 14 aa, Homo sapiens
CQSADNDGSYHWVF

SEQ ID NO: 37437 - protein, 14 aa, Homo sapiens
CAGRRATDASFDFW

SEQ ID NO: 37438 - protein, 11 aa, Homo sapiens
CQQSDKVSVTF

SEQ ID NO: 37439 - protein, 18 aa, Homo sapiens
CARDRGENYESSGYQDYW

SEQ ID NO: 37440 - protein, 14 aa, Homo sapiens
CARGVGRASSPDYW

SEQ ID NO: 37441 - protein, 14 aa, Homo sapiens
CAKVSPRLRYFQNW

SEQ ID NO: 37442 - protein, 17 aa, Homo sapiens
CARQDSGYDREGYIDSW

SEQ ID NO: 37443 - protein, 15 aa, Homo sapiens
CARHDIVVVDYFDYW

SEQ ID NO: 37444 - protein, 23 aa, Homo sapiens
CARVRWVSTIIVVAMPVDAFDIW

SEQ ID NO: 37445 - protein, 23 aa, Homo sapiens
CARDGDPWGVPLVRGLLGPVDYW

SEQ ID NO: 37446 - protein, 19 aa, Homo sapiens
CTSTRVSLRFLEWLFEDYW

SEQ ID NO: 37447 - protein, 22 aa, Homo sapiens
CARFPGRYFDWLLYSSSDFDYW

SEQ ID NO: 37448 - protein, 16 aa, Homo sapiens
CARVRLVSDNWHFDLW

SEQ ID NO: 37449 - protein, 20 aa, Homo sapiens
CARNRKVPRFLAGSRYMDVW

SEQ ID NO: 37450 - protein, 18 aa, Homo sapiens
CARVRFQDTWSKWYFDSW

SEQ ID NO: 37451 - protein, 16 aa, Homo sapiens
CAREDGGTLAKYFDSW

SEQ ID NO: 37452 - protein, 16 aa, Homo sapiens
CVREKSGWTGTEFDHW

SEQ ID NO: 37453 - protein, 22 aa, Homo sapiens
CARETYYYDSSAAGYYYYMDVW

SEQ ID NO: 37454 - protein, 22 aa, Homo sapiens
CARDVDIVVVPAHKLYNWFDPW

SEQ ID NO: 37455 - protein, 19 aa, Homo sapiens
CAKEGNVYYDSSGYLVDYW

SEQ ID NO: 37456 - protein, 15 aa, Homo sapiens
CARGWLRSPWSFDLW

SEQ ID NO: 37457 - protein, 19 aa, Homo sapiens
CVRGGGVLWFGTQGTFDIW

SEQ ID NO: 37458 - protein, 16 aa, Homo sapiens
CARDVGATWGYYFDYW

SEQ ID NO: 37459 - protein, 21 aa, Homo sapiens
CARDRDGWLNEDHLLYLFDSW

SEQ ID NO: 37460 - protein, 15 aa, Homo sapiens
CAREGGFNGEALDIW

SEQ ID NO: 37461 - protein, 16 aa, Homo sapiens
CVKEGCSSSSCYMDVW

SEQ ID NO: 37462 - protein, 11 aa, Homo sapiens
CVSGSYYHDYW

SEQ ID NO: 37463 - protein, 18 aa, Homo sapiens
CAKDQGGYSNLDYYMDVW

SEQ ID NO: 37464 - protein, 20 aa, Homo sapiens
CARETVSMIVVLNGNAFDIW

SEQ ID NO: 37465 - protein, 17 aa, Homo sapiens
CARVRVTMTRANWIDLW

SEQ ID NO: 37466 - protein, 16 aa, Homo sapiens
CARGHNNGWPYFFDYW

SEQ ID NO: 37467 - protein, 20 aa, Homo sapiens
CARGLTPEYDFEPSNWIDPW

SEQ ID NO: 37468 - protein, 22 aa, Homo sapiens
CARGERFCSSSRCYYYHYMDVW

SEQ ID NO: 37469 - protein, 26 aa, Homo sapiens
CARGYKGEYCTSSICTLGDSYYMDVW

SEQ ID NO: 37470 - protein, 15 aa, Homo sapiens
CANLPPGLPNWFDPW

SEQ ID NO: 37471 - protein, 17 aa, Homo sapiens
CATLRSGAYRYVAFDIW

SEQ ID NO: 37472 - protein, 17 aa, Homo sapiens
CARVFLDYGGNYYFGYW

SEQ ID NO: 37473 - protein, 15 aa, Homo sapiens
CAVWDDSLSGRRVVF

SEQ ID NO: 37474 - protein, 16 aa, Homo sapiens
CARGTEWPRAHGIDYW

SEQ ID NO: 37475 - protein, 20 aa, Homo sapiens
CARDSFDYDSSGPPPGFDYW

SEQ ID NO: 37476 - protein, 20 aa, Homo sapiens
CAVYKRHCIGESCLWYFDLW

SEQ ID NO: 37477 - protein, 12 aa, Homo sapiens
CEQYNSSPRVSF

SEQ ID NO: 37478 - protein, 22 aa, Homo sapiens
CARDEGSSSSWYVGHETGIDYW

SEQ ID NO: 37479 - protein, 15 aa, Homo sapiens
CARERGGYSGRFDSW

SEQ ID NO: 37480 - protein, 17 aa, Homo sapiens
CVKSLLEKATIIPFDYW

SEQ ID NO: 37481 - protein, 17 aa, Homo sapiens
CAKDRTRLSGTYHFDDW

SEQ ID NO: 37482 - protein, 18 aa, Homo sapiens
CARTVSATIVGPYYMDVW

SEQ ID NO: 37483 - protein, 13 aa, Homo sapiens
CQEYKSYSAEGTF

SEQ ID NO: 37484 - protein, 17 aa, Homo sapiens
CARGAGGYYLGNYFDPW

SEQ ID NO: 37485 - protein, 17 aa, Homo sapiens
CVTAFYVSYYYYYSDVW

SEQ ID NO: 37486 - protein, 24 aa, Homo sapiens
CARDTRLELRPVGRFRHFYYMDVW

SEQ ID NO: 37487 - protein, 13 aa, Homo sapiens
CLQYNTYSATWPF

SEQ ID NO: 37488 - protein, 15 aa, Homo sapiens
CARDSMGTYFYMDVW

SEQ ID NO: 37489 - protein, 17 aa, Homo sapiens
CARLGTVRYFDWPFDHW

SEQ ID NO: 37490 - protein, 17 aa, Homo sapiens
CARDSYGGNPPDPLDIW

SEQ ID NO: 37491 - protein, 21 aa, Homo sapiens
CARGRSHWYDSSGYRSWFDPW

SEQ ID NO: 37492 - protein, 15 aa, Homo sapiens
CARERGIAAAGFDPW

SEQ ID NO: 37493 - protein, 18 aa, Homo sapiens
CAKEITIAGHWVGYFQHW

SEQ ID NO: 37494 - protein, 13 aa, Homo sapiens
CQQYYTTPPAWTF

SEQ ID NO: 37495 - protein, 17 aa, Homo sapiens
CARGYEGSWGRYYFDSW

SEQ ID NO: 37496 - protein, 16 aa, Homo sapiens
CVKGKGNYYDSSFDSW

SEQ ID NO: 37497 - protein, 27 aa, Homo sapiens
CTTDPQTLIRAVPSSHTTYSYSYMDVW

SEQ ID NO: 37498 - protein, 23 aa, Homo sapiens
CARENTGPYHHGITSTTYFLDYW

SEQ ID NO: 37499 - protein, 24 aa, Homo sapiens
CARDRAGYCSGGSCPRPDDAFDIW

SEQ ID NO: 37500 - protein, 23 aa, Homo sapiens
CASLYYDFWSGYYGHLRGWFDPW

SEQ ID NO: 37501 - protein, 20 aa, Homo sapiens
CAKSPHYYDSSGYYTHFDYW

SEQ ID NO: 37502 - protein, 17 aa, Homo sapiens
CARGGFIPYRGTFLDYW

SEQ ID NO: 37503 - protein, 21 aa, Homo sapiens
CAKGGSPAEGTAGPVAPFDPW

SEQ ID NO: 37504 - protein, 17 aa, Homo sapiens
CATTPTVVTGYHYMDVW

SEQ ID NO: 37505 - protein, 21 aa, Homo sapiens
CARGESSDFWSGYSEGTFDYW

SEQ ID NO: 37506 - protein, 20 aa, Homo sapiens
CARESELHVLSHYYYYMDVW

SEQ ID NO: 37507 - protein, 23 aa, Homo sapiens
CARAYDYYDSSGYYYQGRPFDMW

SEQ ID NO: 37508 - protein, 17 aa, Homo sapiens
CTRGRLWFALDPHFDYW

SEQ ID NO: 37509 - protein, 17 aa, Homo sapiens
CARRRLAWNDDEGFDSW

SEQ ID NO: 37510 - protein, 17 aa, Homo sapiens
CARSAGWGRENYYMDAW

SEQ ID NO: 37511 - protein, 19 aa, Homo sapiens
CARMTGGLERLSSRAFDIW

SEQ ID NO: 37512 - protein, 21 aa, Homo sapiens
CAREGRSTRFLEWVLYYFDSW

SEQ ID NO: 37513 - protein, 19 aa, Homo sapiens
CAKDQFCSSITCYSPFDYW

SEQ ID NO: 37514 - protein, 15 aa, Homo sapiens
CAKDQWRGAWPPDYW

SEQ ID NO: 37515 - protein, 22 aa, Homo sapiens
CAKDGGGYCSGLSCWHVAYDIW

SEQ ID NO: 37516 - protein, 15 aa, Homo sapiens
CAKGQWLVFSYFDSW

SEQ ID NO: 37517 - protein, 16 aa, Homo sapiens
CARGERGGPATPFDAW

SEQ ID NO: 37518 - protein, 11 aa, Homo sapiens
CVRGVTVIDYW

SEQ ID NO: 37519 - protein, 24 aa, Homo sapiens
CARASRRRNFGSGSTPDFYYMDVW

SEQ ID NO: 37520 - protein, 18 aa, Homo sapiens
CAGGLPQADSSWFGFDPW

SEQ ID NO: 37521 - protein, 23 aa, Homo sapiens
CARDGILRYFDWFIQSWHYFDYW

SEQ ID NO: 37522 - protein, 19 aa, Homo sapiens
CAKFDMRSGYPYYYYMDVW

SEQ ID NO: 37523 - protein, 18 aa, Homo sapiens
CAKDRYGDYGVRSAMDVW

SEQ ID NO: 37524 - protein, 18 aa, Homo sapiens
CARVGNIYSYIKGGFDTW

SEQ ID NO: 37525 - protein, 21 aa, Homo sapiens
CAREYYDFLSGYNRGHYFDYW

SEQ ID NO: 37526 - protein, 18 aa, Homo sapiens
CARGRSRFNWNWYYFDYW

SEQ ID NO: 37527 - protein, 18 aa, Homo sapiens
CARDEMASYGYRGAFDLW

SEQ ID NO: 37528 - protein, 13 aa, Homo sapiens
CAHEQIPSFFDYW

SEQ ID NO: 37529 - protein, 20 aa, Homo sapiens
CVRELSRLWNYAPLAEIDYW

SEQ ID NO: 37530 - protein, 15 aa, Homo sapiens
CARDKTGGGGTLDYW

SEQ ID NO: 37531 - protein, 24 aa, Homo sapiens
CARHFCTSTTCTPRAGFYYYMDAW

SEQ ID NO: 37532 - protein, 25 aa, Homo sapiens
CARELSGRVASRQWGVYLYFYMDVW

SEQ ID NO: 37533 - protein, 14 aa, Homo sapiens
CAKDWLWYGKLDYW

SEQ ID NO: 37534 - protein, 14 aa, Homo sapiens
CAREGITGTTGDYW

SEQ ID NO: 37535 - protein, 14 aa, Homo sapiens
CQSYDSTNPLIWVF

SEQ ID NO: 37536 - protein, 18 aa, Homo sapiens
CVRVDCGGDCLGDAFDFW

SEQ ID NO: 37537 - protein, 23 aa, Homo sapiens
CARAFLPNYTSWDDYRMYFFDYW

SEQ ID NO: 37538 - protein, 18 aa, Homo sapiens
CATEPDSPVAGDIHFDFW

SEQ ID NO: 37539 - protein, 17 aa, Homo sapiens
CAKGPRITLVRGGIDYW

SEQ ID NO: 37540 - protein, 21 aa, Homo sapiens
CARLGKSPLAASHWRDPFNIW

SEQ ID NO: 37541 - protein, 12 aa, Homo sapiens
CAKAVSDYFDYW

SEQ ID NO: 37542 - protein, 16 aa, Homo sapiens
CAKGTRNRATLAWDYW

SEQ ID NO: 37543 - protein, 17 aa, Homo sapiens
CAKEGVTETFYWYFDLW

SEQ ID NO: 37544 - protein, 16 aa, Homo sapiens
CARETTTSNMRYLDYW

SEQ ID NO: 37545 - protein, 17 aa, Homo sapiens
CARAGALLRGGGYFDSW

SEQ ID NO: 37546 - protein, 16 aa, Homo sapiens
CARVTRGAVWHYFDYW

SEQ ID NO: 37547 - protein, 16 aa, Homo sapiens
CARDVIAAAGTRVDYW

SEQ ID NO: 37548 - protein, 13 aa, Homo sapiens
CAKGEDGGGLDYW

SEQ ID NO: 37549 - protein, 18 aa, Homo sapiens
CARDNDWGLRADDAFDIW

SEQ ID NO: 37550 - protein, 18 aa, Homo sapiens
CARDRIGAPGEPWAFDLW

SEQ ID NO: 37551 - protein, 18 aa, Homo sapiens
CARYKILQFLQWDAFDLW

SEQ ID NO: 37552 - protein, 19 aa, Homo sapiens
CARQTYTGSPVDSIYFDHW

SEQ ID NO: 37553 - protein, 19 aa, Homo sapiens
CAKDPGFTSELSYTWFASW

SEQ ID NO: 37554 - protein, 21 aa, Homo sapiens
CARDNGGRYYDSSGYYHFDYW

SEQ ID NO: 37555 - protein, 15 aa, Homo sapiens
CARVSVTGETNFDFW

SEQ ID NO: 37556 - protein, 18 aa, Homo sapiens
CARRGLQRRAPVTGFDFW

SEQ ID NO: 37557 - protein, 14 aa, Homo sapiens
CARVRDYYYYTDVW

SEQ ID NO: 37558 - protein, 17 aa, Homo sapiens
CARVRGYGETLYYFESW

SEQ ID NO: 37559 - protein, 20 aa, Homo sapiens
CVRMAGEAGNRSPDWYFDLW

SEQ ID NO: 37560 - protein, 14 aa, Homo sapiens
CAKGHLGHWYFQVW

SEQ ID NO: 37561 - protein, 20 aa, Homo sapiens
CARLEGIVVVPAAMRVTDYW

SEQ ID NO: 37562 - protein, 19 aa, Homo sapiens
CARDVVKRVDTFYYYMDVW

SEQ ID NO: 37563 - protein, 12 aa, Homo sapiens
CVREGGNWFDTW

SEQ ID NO: 37564 - protein, 16 aa, Homo sapiens
CAMTITVTSGRYFDYW

SEQ ID NO: 37565 - protein, 16 aa, Homo sapiens
CTTQGSSGSSTRFDNW

SEQ ID NO: 37566 - protein, 18 aa, Homo sapiens
CARGRLLIAAAANWIDPW

SEQ ID NO: 37567 - protein, 18 aa, Homo sapiens
CARDGAYGSGNRNYFDYW

SEQ ID NO: 37568 - protein, 14 aa, Homo sapiens
CAKIGGPPRYFDYW

SEQ ID NO: 37569 - protein, 22 aa, Homo sapiens
CARDFDPVGCASVICSNLVDYW

SEQ ID NO: 37570 - protein, 17 aa, Homo sapiens
CASMSDYYDSSGYVDYW

SEQ ID NO: 37571 - protein, 15 aa, Homo sapiens
CTRGNGANPEGFDVW

SEQ ID NO: 37572 - protein, 17 aa, Homo sapiens
CAHKALVKYLATSFDYW

SEQ ID NO: 37573 - protein, 17 aa, Homo sapiens
CAKDQSSGYGENYFDYW

SEQ ID NO: 37574 - protein, 13 aa, Homo sapiens
CAKDQRNQAFDMW

SEQ ID NO: 37575 - protein, 19 aa, Homo sapiens
CARDQRATNNWNPDAFDIW

SEQ ID NO: 37576 - protein, 18 aa, Homo sapiens
CARVGENYFDSSGPFDPW

SEQ ID NO: 37577 - protein, 26 aa, Homo sapiens
CARASSWKYFQDGGDGHDYYYYIDVW

SEQ ID NO: 37578 - protein, 17 aa, Homo sapiens
CARYRDEWELTQPKDYW

SEQ ID NO: 37579 - protein, 12 aa, Homo sapiens
CQQYRYYPAISF

SEQ ID NO: 37580 - protein, 21 aa, Homo sapiens
CARDLGGSYSRLGYYYYMDVW

SEQ ID NO: 37581 - protein, 13 aa, Homo sapiens
CARGTLGNYFDPW

SEQ ID NO: 37582 - protein, 19 aa, Homo sapiens
CARARRDSGTWGGDWFDTW

SEQ ID NO: 37583 - protein, 15 aa, Homo sapiens
CARTGITVVRGLDYW

SEQ ID NO: 37584 - protein, 22 aa, Homo sapiens
CARERGRITMIVVVTPDAFDIW

SEQ ID NO: 37585 - protein, 19 aa, Homo sapiens
CARAGRHCPSTRCYYLDNW

SEQ ID NO: 37586 - protein, 19 aa, Homo sapiens
CATEADCTGASCPGYFQDW

SEQ ID NO: 37587 - protein, 23 aa, Homo sapiens
CARVVKPTYDSSGYYYYYYMDVW

SEQ ID NO: 37588 - protein, 17 aa, Homo sapiens
CARQAGNYAGSCPFDNW

SEQ ID NO: 37589 - protein, 22 aa, Homo sapiens
CATDMAFVYYDSSGSPYSPDYW

SEQ ID NO: 37590 - protein, 16 aa, Homo sapiens
CASVPYSSTDYFFDYW

SEQ ID NO: 37591 - protein, 15 aa, Homo sapiens
CTTDAQWFQGAFDIW

SEQ ID NO: 37592 - protein, 18 aa, Homo sapiens
CARDNQRHDISSFWFDPW

SEQ ID NO: 37593 - protein, 20 aa, Homo sapiens
CARREPLAYFGPGRNWFDPW

SEQ ID NO: 37594 - protein, 16 aa, Homo sapiens
CARELHTSGWGVLDYW

SEQ ID NO: 37595 - protein, 17 aa, Homo sapiens
CAKDMGDTIMPHYFDSW

SEQ ID NO: 37596 - protein, 20 aa, Homo sapiens
CARGGTTYDNIMSGLLFDYW

SEQ ID NO: 37597 - protein, 15 aa, Homo sapiens
CARDNGQSGYGDDYW

SEQ ID NO: 37598 - protein, 14 aa, Homo sapiens
CARHWKQPWWFDPW

SEQ ID NO: 37599 - protein, 14 aa, Homo sapiens
CFLSYSGARRLWVF

SEQ ID NO: 37600 - protein, 17 aa, Homo sapiens
CARDWRQSIENEAFDIW

SEQ ID NO: 37601 - protein, 21 aa, Homo sapiens
CARPRTYYYDSSGGYFGFDVW

SEQ ID NO: 37602 - protein, 17 aa, Homo sapiens
CARFDSSGYYSDGFDIW

SEQ ID NO: 37603 - protein, 18 aa, Homo sapiens
CARHHSSSERRMNWFDPW

SEQ ID NO: 37604 - protein, 21 aa, Homo sapiens
CAKSYNHEQWLAGFGNAFDIW

SEQ ID NO: 37605 - protein, 20 aa, Homo sapiens
CSRLGDDSSSEGYYYYMDVW

SEQ ID NO: 37606 - protein, 18 aa, Homo sapiens
CARVVSSYRSSVDAFDYW

SEQ ID NO: 37607 - protein, 18 aa, Homo sapiens
CAKDRYSGSTEIKAVDIW

SEQ ID NO: 37608 - protein, 21 aa, Homo sapiens
CARAPTPPWIPSYYHYYMDVW

SEQ ID NO: 37609 - protein, 14 aa, Homo sapiens
CVVGSGSYWGVDYW

SEQ ID NO: 37610 - protein, 16 aa, Homo sapiens
CARLSLDYDGYLLDYW

SEQ ID NO: 37611 - protein, 13 aa, Homo sapiens
CQQSGRSPPMYTF

SEQ ID NO: 37612 - protein, 18 aa, Homo sapiens
CASLSGSYQMAPDAFDIW

SEQ ID NO: 37613 - protein, 18 aa, Homo sapiens
CARGTFGGAIVINYFDYW

SEQ ID NO: 37614 - protein, 20 aa, Homo sapiens
CQQYNNSPPPTYGSSPPPTF

SEQ ID NO: 37615 - protein, 13 aa, Homo sapiens
CHSYDSTNSNWVF

SEQ ID NO: 37616 - protein, 25 aa, Homo sapiens
CARGGPELEVIRRLPTAKRYYFDYW

SEQ ID NO: 37617 - protein, 19 aa, Homo sapiens
CARGPNSYGYGYYYYMDVW

SEQ ID NO: 37618 - protein, 13 aa, Homo sapiens
CYSTDSSTSHVLF

SEQ ID NO: 37619 - protein, 21 aa, Homo sapiens
CAQGGTSWHTAVGYYYYMDVW

SEQ ID NO: 37620 - protein, 20 aa, Homo sapiens
CVREKFSRYDYGMANWFDAW

SEQ ID NO: 37621 - protein, 16 aa, Homo sapiens
CARGVRFGIDDALDIW

SEQ ID NO: 37622 - protein, 20 aa, Homo sapiens
CTRINVLRSMEWLSPFFDSW

SEQ ID NO: 37623 - protein, 17 aa, Homo sapiens
CVRDGESHRGVNWFDPW

SEQ ID NO: 37624 - protein, 17 aa, Homo sapiens
CARALGEWDVMSPFDNW

SEQ ID NO: 37625 - protein, 18 aa, Homo sapiens
CAHSLPINYDREGYFDFW

SEQ ID NO: 37626 - protein, 21 aa, Homo sapiens
CARGGKGLRGENYYFYYMDVW

SEQ ID NO: 37627 - protein, 17 aa, Homo sapiens
CARDGCSGGSCYLLDYW

SEQ ID NO: 37628 - protein, 16 aa, Homo sapiens
CARANSGSYKDAFDIW

SEQ ID NO: 37629 - protein, 17 aa, Homo sapiens
CAKDFRSYDRVESFDYW

SEQ ID NO: 37630 - protein, 16 aa, Homo sapiens
CARGAAPSNGGYFDHW

SEQ ID NO: 37631 - protein, 16 aa, Homo sapiens
CAKAPTWFGESYFDYW

SEQ ID NO: 37632 - protein, 19 aa, Homo sapiens
CARGPNDNTGHFSSGFDFW

SEQ ID NO: 37633 - protein, 16 aa, Homo sapiens
CARRGSSWDHRYFDYW

SEQ ID NO: 37634 - protein, 16 aa, Homo sapiens
CARHQINVVTYFFDYW

SEQ ID NO: 37635 - protein, 15 aa, Homo sapiens
CTTMVRGVNHYFDYW

SEQ ID NO: 37636 - protein, 18 aa, Homo sapiens
CARNNRERYHYYYYMDVW

SEQ ID NO: 37637 - protein, 19 aa, Homo sapiens
CARYYDFWSGYDYWFFDLW

SEQ ID NO: 37638 - protein, 15 aa, Homo sapiens
CSRINDQEERYFDHW

SEQ ID NO: 37639 - protein, 16 aa, Homo sapiens
CGHYGRDGNNYYYDFW

SEQ ID NO: 37640 - protein, 16 aa, Homo sapiens
CARVRVRGGDWYFDLW

SEQ ID NO: 37641 - protein, 20 aa, Homo sapiens
CARDWTRRVYSYGWHYFDYW

SEQ ID NO: 37642 - protein, 18 aa, Homo sapiens
CARVSGRGFGGVIAFGYW

SEQ ID NO: 37643 - protein, 12 aa, Homo sapiens
CASGVGMAFDFW

SEQ ID NO: 37644 - protein, 16 aa, Homo sapiens
CATAGTLQWLTSLDYW

SEQ ID NO: 37645 - protein, 23 aa, Homo sapiens
CATTPRITMLRGVITSAEYFQHW

SEQ ID NO: 37646 - protein, 21 aa, Homo sapiens
CARVGDFDYVWGSYRHSFDYW

SEQ ID NO: 37647 - protein, 14 aa, Homo sapiens
CARKETMEHYFDYW

SEQ ID NO: 37648 - protein, 18 aa, Homo sapiens
CASLPALDDIAAHAFDIW

SEQ ID NO: 37649 - protein, 15 aa, Homo sapiens
CARGHKGSDTPWDYW

SEQ ID NO: 37650 - protein, 16 aa, Homo sapiens
CARAPRFDLVGAFDIW

SEQ ID NO: 37651 - protein, 19 aa, Homo sapiens
CARRGDLAAAVPLFYFDYW

SEQ ID NO: 37652 - protein, 18 aa, Homo sapiens
CARQYIAEAAPGDNFDYW

SEQ ID NO: 37653 - protein, 15 aa, Homo sapiens
CARVTYHVKDASDIW

SEQ ID NO: 37654 - protein, 20 aa, Homo sapiens
CARGDDYYDSGAYYWSFNLW

SEQ ID NO: 37655 - protein, 19 aa, Homo sapiens
CARGLGYCRGGSCSLLDYW

SEQ ID NO: 37656 - protein, 16 aa, Homo sapiens
CAGSDYGDYIDWFDPW

SEQ ID NO: 37657 - protein, 17 aa, Homo sapiens
CARQGLHGGNHDVLDIW

SEQ ID NO: 37658 - protein, 19 aa, Homo sapiens
CVRVGPHLSRVMQWLFDSW

SEQ ID NO: 37659 - protein, 18 aa, Homo sapiens
CAKDQGSVVVIADPPDYW

SEQ ID NO: 37660 - protein, 14 aa, Homo sapiens
CARLEWLAAPFDFW

SEQ ID NO: 37661 - protein, 15 aa, Homo sapiens
CARDGCGGDCPFDQW

SEQ ID NO: 37662 - protein, 17 aa, Homo sapiens
CARRVGTWSGTWALDIW

SEQ ID NO: 37663 - protein, 21 aa, Homo sapiens
CARRHCSEGVCRFGGDAFDVW

SEQ ID NO: 37664 - protein, 19 aa, Homo sapiens
CARDLPYYDILTGYGVDYW

SEQ ID NO: 37665 - protein, 14 aa, Homo sapiens
CARVFHLTTAFDVW

SEQ ID NO: 37666 - protein, 18 aa, Homo sapiens
CARDPPRGRGSWYYLDFW

SEQ ID NO: 37667 - protein, 15 aa, Homo sapiens
CAKGGITHGGYFDYW

SEQ ID NO: 37668 - protein, 11 aa, Homo sapiens
CAKGAAATDYW

SEQ ID NO: 37669 - protein, 19 aa, Homo sapiens
CARDRSFIRYGSGSYEDYW

SEQ ID NO: 37670 - protein, 16 aa, Homo sapiens
CAAPLSGSYYSSFVYW

SEQ ID NO: 37671 - protein, 12 aa, Homo sapiens
CAKERSASPDYW

SEQ ID NO: 37672 - protein, 17 aa, Homo sapiens
CARRGIGSNIQYHFDYW

SEQ ID NO: 37673 - protein, 13 aa, Homo sapiens
CARQVAIGYFDFW

SEQ ID NO: 37674 - protein, 19 aa, Homo sapiens
CARIMRLSSGDHGHVFDVW

SEQ ID NO: 37675 - protein, 16 aa, Homo sapiens
CACQGRFGYGLAFEYW

SEQ ID NO: 37676 - protein, 13 aa, Homo sapiens
CARDNYGGPFDMW

SEQ ID NO: 37677 - protein, 22 aa, Homo sapiens
CATGGTPPVYFFGSRTYPFDYW

SEQ ID NO: 37678 - protein, 13 aa, Homo sapiens
CHQRSNWPPGHSF

SEQ ID NO: 37679 - protein, 17 aa, Homo sapiens
CARHPPAMTREYYLDSW

SEQ ID NO: 37680 - protein, 19 aa, Homo sapiens
CAKGGGGFLEWLQYYMDVW

SEQ ID NO: 37681 - protein, 14 aa, Homo sapiens
CATMRGYNNWFDSW

SEQ ID NO: 37682 - protein, 15 aa, Homo sapiens
CVKGSSSWFFVFDNW

SEQ ID NO: 37683 - protein, 19 aa, Homo sapiens
CARLVGDAGSYSSSSVDYW

SEQ ID NO: 37684 - protein, 19 aa, Homo sapiens
CAKELGIRTVTTSPFFDSW

SEQ ID NO: 37685 - protein, 11 aa, Homo sapiens
CARFSPDFDYW

SEQ ID NO: 37686 - protein, 18 aa, Homo sapiens
CARDQQAYDFWSGYYDSW

SEQ ID NO: 37687 - protein, 20 aa, Homo sapiens
CAKGFQAYSTSRHETYFDSW

SEQ ID NO: 37688 - protein, 14 aa, Homo sapiens
CARLVSGRFYIDYW

SEQ ID NO: 37689 - protein, 20 aa, Homo sapiens
CASSDYGDYAGGYYYYMDVW

SEQ ID NO: 37690 - protein, 18 aa, Homo sapiens
CAHTQYSSSFYYHYMDVW

SEQ ID NO: 37691 - protein, 18 aa, Homo sapiens
CARWDYSDYRKTLAFDVW

SEQ ID NO: 37692 - protein, 14 aa, Homo sapiens
CQVWDSGSAQPQVF

SEQ ID NO: 37693 - protein, 22 aa, Homo sapiens
CARNPIWASVPHSPVGDRFDPW

SEQ ID NO: 37694 - protein, 19 aa, Homo sapiens
CARDGCTSTSCDYYYMDVW

SEQ ID NO: 37695 - protein, 19 aa, Homo sapiens
CAHRREESGSWDGGYFDYW

SEQ ID NO: 37696 - protein, 19 aa, Homo sapiens
CARGVRVVVPVPYNWFDPW

SEQ ID NO: 37697 - protein, 20 aa, Homo sapiens
CAKVKYDFWSGYYGYYFDSW

SEQ ID NO: 37698 - protein, 17 aa, Homo sapiens
CATDAGGGYTFGYADYW

SEQ ID NO: 37699 - protein, 16 aa, Homo sapiens
CATDGVGRTSYYMDVW

SEQ ID NO: 37700 - protein, 13 aa, Homo sapiens
CARKPDIVAFDYW

SEQ ID NO: 37701 - protein, 22 aa, Homo sapiens
CARVICGGDCRWGSYYYYMDVW

SEQ ID NO: 37702 - protein, 18 aa, Homo sapiens
CARDRTWGAYRPYYLDSW

SEQ ID NO: 37703 - protein, 16 aa, Homo sapiens
CARSRYDYGDQRFDYW

SEQ ID NO: 37704 - protein, 17 aa, Homo sapiens
CARDPGDGYTRLPFDYW

SEQ ID NO: 37705 - protein, 19 aa, Homo sapiens
CAKDIGSVVIIGPYYFHSW

SEQ ID NO: 37706 - protein, 16 aa, Homo sapiens
CARVMSAGDSSAIDYW

SEQ ID NO: 37707 - protein, 16 aa, Homo sapiens
CARQTPWGLGAKFDYW

SEQ ID NO: 37708 - protein, 20 aa, Homo sapiens
CAKDVAYCTSANCFEAFDVW

SEQ ID NO: 37709 - protein, 15 aa, Homo sapiens
CARSKALSDSSFDYW

SEQ ID NO: 37710 - protein, 17 aa, Homo sapiens
CARDPGLAAKGHWFDLW

SEQ ID NO: 37711 - protein, 23 aa, Homo sapiens
CARDRRGYSYGIRNKNYYYMDVW

SEQ ID NO: 37712 - protein, 17 aa, Homo sapiens
CAKDRAAAGTRDYFDYW

SEQ ID NO: 37713 - protein, 16 aa, Homo sapiens
CARDVGEHNYGDFDSW

SEQ ID NO: 37714 - protein, 20 aa, Homo sapiens
CAKDRHDILTGYYRGVFDYW

SEQ ID NO: 37715 - protein, 19 aa, Homo sapiens
CAKRGNARYDILTGSIDYW

SEQ ID NO: 37716 - protein, 21 aa, Homo sapiens
CATNYDSSGYRLTIGDYFDYW

SEQ ID NO: 37717 - protein, 32 aa, Homo sapiens
CTTDNKGTPYYDFWSGYYTGLGGYYYYGMDVW

SEQ ID NO: 37718 - protein, 21 aa, Homo sapiens
CARDPSRDYDSRGFSLYFDYW

SEQ ID NO: 37719 - protein, 24 aa, Homo sapiens
CARDRSSSAWITLGATPSYYFDYW

SEQ ID NO: 37720 - protein, 20 aa, Homo sapiens
CTRGDIVTIPAASYNWFDTW

SEQ ID NO: 37721 - protein, 32 aa, Homo sapiens
CASVFQGTYYDFWSGYTGGFGEYYYYYGMDVW

SEQ ID NO: 37722 - protein, 13 aa, Homo sapiens
CARDPAATGFDFW

SEQ ID NO: 37723 - protein, 15 aa, Homo sapiens
CARMPYGYVGGRDYW

SEQ ID NO: 37724 - protein, 22 aa, Homo sapiens
CARNPVYLDCSDCHGRDVFDIW

SEQ ID NO: 37725 - protein, 19 aa, Homo sapiens
CTRLGDYYDSSGYYSLDYW

SEQ ID NO: 37726 - protein, 20 aa, Homo sapiens
CARGDYDFWSGYYYNWFDPW

SEQ ID NO: 37727 - protein, 20 aa, Homo sapiens
CTRDELFCLNDVCSAWFGPW

SEQ ID NO: 37728 - protein, 18 aa, Homo sapiens
CAKELTDHDYGGPQFDYW

SEQ ID NO: 37729 - protein, 20 aa, Homo sapiens
CAGDQGLVISLNYYYGMDVW

SEQ ID NO: 37730 - protein, 15 aa, Homo sapiens
CARISPLTHDSFNIW

SEQ ID NO: 37731 - protein, 27 aa, Homo sapiens
CARDIRYFDWLGPMDPYYYYYYGMDVW

SEQ ID NO: 37732 - protein, 22 aa, Homo sapiens
CARGLRWLLLRTDYYYYGMDVW

SEQ ID NO: 37733 - protein, 19 aa, Homo sapiens
CARDQGGSYGPYYYGMDVW

SEQ ID NO: 37734 - protein, 15 aa, Homo sapiens
CVRQAPGRRGDFDSW

SEQ ID NO: 37735 - protein, 21 aa, Homo sapiens
CASAYYYDSSGYYHGHAFDIW

SEQ ID NO: 37736 - protein, 18 aa, Homo sapiens
CAKDPPGQWLVDLDPDYW

SEQ ID NO: 37737 - protein, 17 aa, Homo sapiens
CARHIVVVTAAGYFDYW

SEQ ID NO: 37738 - protein, 19 aa, Homo sapiens
CTTESLNYDILTGYYTDYW

SEQ ID NO: 37739 - protein, 27 aa, Homo sapiens
CARDGLNHYNPYIAVAGTSYYYGMDVW

SEQ ID NO: 37740 - protein, 19 aa, Homo sapiens
CARSSKARIQLWPHYFDYW

SEQ ID NO: 37741 - protein, 17 aa, Homo sapiens
CAKVLGGNYYYYGMDVW

SEQ ID NO: 37742 - protein, 22 aa, Homo sapiens
CARAENLTIFGVVIFPGWFDPW

SEQ ID NO: 37743 - protein, 20 aa, Homo sapiens
CAREPQPMYYDFWSGPIDYW

SEQ ID NO: 37744 - protein, 23 aa, Homo sapiens
CARAGRSSWTRLHYPYYYGMDVW

SEQ ID NO: 37745 - protein, 13 aa, Homo sapiens
CADSNGHSAWDYW

SEQ ID NO: 37746 - protein, 22 aa, Homo sapiens
CARARVGRFFGVVTASDAFDIW

SEQ ID NO: 37747 - protein, 25 aa, Homo sapiens
CAKDLKRYCSSTSCYVFYYYGMDVW

SEQ ID NO: 37748 - protein, 24 aa, Homo sapiens
CARDATRYYYDSSAYLGPDAFDIW

SEQ ID NO: 37749 - protein, 12 aa, Homo sapiens
CANDYGGYGGYW

SEQ ID NO: 37750 - protein, 21 aa, Homo sapiens
CARGPPVPLVAGTRSEGDDYW

SEQ ID NO: 37751 - protein, 24 aa, Homo sapiens
CVKASHAPLDTIFGVVIIGAFDIW

SEQ ID NO: 37752 - protein, 18 aa, Homo sapiens
CATGPPLGRSVGSWFDPW

SEQ ID NO: 37753 - protein, 17 aa, Homo sapiens
CAKAKQHITYYYGMDVW

SEQ ID NO: 37754 - protein, 28 aa, Homo sapiens
CAKDYDPIDDLITMMVVVISTRSAFDIW

SEQ ID NO: 37755 - protein, 21 aa, Homo sapiens
CARDPLLDYGDYVVGDWFDPW

SEQ ID NO: 37756 - protein, 18 aa, Homo sapiens
CARHVENEVAIYNWFDPW

SEQ ID NO: 37757 - protein, 16 aa, Homo sapiens
CAIPSSGSYFGYFDYW

SEQ ID NO: 37758 - protein, 27 aa, Homo sapiens
CARDVGTYFYGSGGYGLPPPRGWFDPW

SEQ ID NO: 37759 - protein, 25 aa, Homo sapiens
CARDCLLADSVVAAMALMDDAFDIW

SEQ ID NO: 37760 - protein, 15 aa, Homo sapiens
CQSGDTSGPYPVVLF

SEQ ID NO: 37761 - protein, 18 aa, Homo sapiens
CARDSPFTLGELSYIDYW

SEQ ID NO: 37762 - protein, 21 aa, Homo sapiens
CARDDSSGSLTDYYYYGMDVW

SEQ ID NO: 37763 - protein, 20 aa, Homo sapiens
CAREIIQLWPTYYYYGMDVW

SEQ ID NO: 37764 - protein, 19 aa, Homo sapiens
CARERGYSGYGSVSYFDYW

SEQ ID NO: 37765 - protein, 23 aa, Homo sapiens
CARDRYYDILTGTRYYYYGMDVW

SEQ ID NO: 37766 - protein, 22 aa, Homo sapiens
CARDPYYFASGTSYMHHQFDYW

SEQ ID NO: 37767 - protein, 18 aa, Homo sapiens
CARHGRWGGYSSGWLDYW

SEQ ID NO: 37768 - protein, 22 aa, Homo sapiens
CASGAVAGTVDSTIYYYGMDVW

SEQ ID NO: 37769 - protein, 19 aa, Homo sapiens
CAGRPTRGNFYEVYYFDYW

SEQ ID NO: 37770 - protein, 18 aa, Homo sapiens
CAKTIGKYQSPLYYFDYW

SEQ ID NO: 37771 - protein, 18 aa, Homo sapiens
CARRESYYYDSSGDFDYW

SEQ ID NO: 37772 - protein, 25 aa, Homo sapiens
CARAGTTSDSSSWYVYDYYYGMDVW

SEQ ID NO: 37773 - protein, 18 aa, Homo sapiens
CARFWVEDSGYDRGVDYW

SEQ ID NO: 37774 - protein, 18 aa, Homo sapiens
CARDRATNIAYYYGMDVW

SEQ ID NO: 37775 - protein, 21 aa, Homo sapiens
CARDRYCSSTSCYPLGWFDPW

SEQ ID NO: 37776 - protein, 16 aa, Homo sapiens
CARLSNINSSLLFDYW

SEQ ID NO: 37777 - protein, 16 aa, Homo sapiens
CQSADSSGTYSEHVVF

SEQ ID NO: 37778 - protein, 17 aa, Homo sapiens
CARFGYYLVRRYWFDPW

SEQ ID NO: 37779 - protein, 18 aa, Homo sapiens
CARLPSAGPYYYYGMDVW

SEQ ID NO: 37780 - protein, 22 aa, Homo sapiens
CARHSLGTIFGVVITPAGFDYW

SEQ ID NO: 37781 - protein, 18 aa, Homo sapiens
CANLMTGVNYYYYGMDVW

SEQ ID NO: 37782 - protein, 16 aa, Homo sapiens
CARHYTDFWSGYQDYW

SEQ ID NO: 37783 - protein, 15 aa, Homo sapiens
CARESGWPHQRLDYW

SEQ ID NO: 37784 - protein, 17 aa, Homo sapiens
CARVAWLGGYYYGMDVW

SEQ ID NO: 37785 - protein, 22 aa, Homo sapiens
CARERPQIAVAGFYYYYGMDVW

SEQ ID NO: 37786 - protein, 27 aa, Homo sapiens
CARVRDTYDFWSGYYHPDYYYYGMDVW

SEQ ID NO: 37787 - protein, 18 aa, Homo sapiens
CARALFYGDYDSYYFDYW

SEQ ID NO: 37788 - protein, 14 aa, Homo sapiens
CARHRGYSRHFDYW

SEQ ID NO: 37789 - protein, 19 aa, Homo sapiens
CVTVIMGPAFLEPYYFDYW

SEQ ID NO: 37790 - protein, 13 aa, Homo sapiens [sequence omitted]

SEQ ID NO: 37791 - protein, 23 aa, Homo sapiens
CARRPLAYIVVVTAIPSGYFDYW

SEQ ID NO: 37792 - protein, 21 aa, Homo sapiens
CAREVPYYYGSGSYPVFIDYW

SEQ ID NO: 37793 - protein, 22 aa, Homo sapiens
CATSRALTIFGVADPLSWFDPW

SEQ ID NO: 37794 - protein, 20 aa, Homo sapiens
CAKDPWDCSGGDCYLYFDYW

SEQ ID NO: 37795 - protein, 14 aa, Homo sapiens
CARITVAGPSLDYW

SEQ ID NO: 37796 - protein, 21 aa, Homo sapiens
CARGYWRRGYSGYDHYFFDYW

SEQ ID NO: 37797 - protein, 25 aa, Homo sapiens
CARAIYVDTLMDILRHNYYYGMDVW

SEQ ID NO: 37798 - protein, 15 aa, Homo sapiens
CAKAEAAAQYDFDHW

SEQ ID NO: 37799 - protein, 24 aa, Homo sapiens
CARWARHSNYDYVWGSYRGEFDYW

SEQ ID NO: 37800 - protein, 29 aa, Homo sapiens
CARDQRYYDILTGYFAQKDYYYYYGMDVW

SEQ ID NO: 37801 - protein, 16 aa, Homo sapiens
CATNVAVVTPGAFDLW

SEQ ID NO: 37802 - protein, 14 aa, Homo sapiens
CARLAARPWSFDLW

SEQ ID NO: 37803 - protein, 26 aa, Homo sapiens
CAKDSREVGYDFWSGYYFSYGWFDPW

SEQ ID NO: 37804 - protein, 17 aa, Homo sapiens
CARPQSGGYAFGFFDSW

SEQ ID NO: 37805 - protein, 15 aa, Homo sapiens
CARLVGELSWAFDYW

SEQ ID NO: 37806 - protein, 25 aa, Homo sapiens
CASGPVTTVTTLSNRLGYYYGMDVW

SEQ ID NO: 37807 - protein, 25 aa, Homo sapiens
CARFREGSSGWSVMGGYYYYGMDVW

SEQ ID NO: 37808 - protein, 23 aa, Homo sapiens
CARGPILHDYVWGSYRYNYFDYW

SEQ ID NO: 37809 - protein, 27 aa, Homo sapiens
CAKDQVTNDKIVVAITGLYYYYGMDVW

SEQ ID NO: 37810 - protein, 22 aa, Homo sapiens
CAVPYYDFWSGYSDYYYGMDVW

SEQ ID NO: 37811 - protein, 21 aa, Homo sapiens
CAKSFNQFLPDDWVSYYFDYW

SEQ ID NO: 37812 - protein, 24 aa, Homo sapiens
CARSSLGYYYESGDNYLPYYFDHW

SEQ ID NO: 37813 - protein, 20 aa, Homo sapiens
CARLTKQWLVQGYPWYFDYW

SEQ ID NO: 37814 - protein, 16 aa, Homo sapiens
CARAKGGSYYVALDYW

SEQ ID NO: 37815 - protein, 17 aa, Homo sapiens
CARGKVYSSLINWFDPW

SEQ ID NO: 37816 - protein, 19 aa, Homo sapiens
CARTTWIQLWLRGFYFDYW

SEQ ID NO: 37817 - protein, 18 aa, Homo sapiens
CARLELRFLEWSSNFDYW

SEQ ID NO: 37818 - protein, 26 aa, Homo sapiens
CARGGCSSTSCYLISSFYYYYGMDVW

SEQ ID NO: 37819 - protein, 14 aa, Homo sapiens
CARNELRGWYFDYW

SEQ ID NO: 37820 - protein, 18 aa, Homo sapiens
CARGAPSPKWVHYFFDSW

SEQ ID NO: 37821 - protein, 22 aa, Homo sapiens
CARENLTGTTVHYYYYYGMDVW

SEQ ID NO: 37822 - protein, 15 aa, Homo sapiens
CASHTERYFWYFDLW

SEQ ID NO: 37823 - protein, 19 aa, Homo sapiens
CARHDRRWLQLTPRFFDYW

SEQ ID NO: 37824 - protein, 13 aa, Homo sapiens
CARDSRVVRFDYW

SEQ ID NO: 37825 - protein, 27 aa, Homo sapiens
CARDGGPYYYDSSGYYYSDYYYGMDVW

SEQ ID NO: 37826 - protein, 22 aa, Homo sapiens
CARVKGVTIFGVVKYPTTFDYW

SEQ ID NO: 37827 - protein, 15 aa, Homo sapiens
CARMIAGRLGAVDYW

SEQ ID NO: 37828 - protein, 21 aa, Homo sapiens
CARGGVSIRSSYYYYYGMDVW

SEQ ID NO: 37829 - protein, 18 aa, Homo sapiens
CARVPLSTFYKKPALDYW

SEQ ID NO: 37830 - protein, 18 aa, Homo sapiens
CARARPLTTVTTSPVDYW

SEQ ID NO: 37831 - protein, 19 aa, Homo sapiens
CARVLIEYSSPVRGAFDMW

SEQ ID NO: 37832 - protein, 18 aa, Homo sapiens
CAKDDRQLTPGLDAFDIW

SEQ ID NO: 37833 - protein, 13 aa, Homo sapiens
CARRRSVGSVDYW

SEQ ID NO: 37834 - protein, 15 aa, Homo sapiens
CARAYSSSWSYFDYW

SEQ ID NO: 37835 - protein, 21 aa, Homo sapiens
CARDRRVRYYDSSGYPYFDYW

SEQ ID NO: 37836 - protein, 12 aa, Homo sapiens
CVRSMRGDFDLW

SEQ ID NO: 37837 - protein, 13 aa, Homo sapiens
CAREVMSRWFDPW

SEQ ID NO: 37838 - protein, 18 aa, Homo sapiens
CARHESLYDSSGPLFGYW

SEQ ID NO: 37839 - protein, 17 aa, Homo sapiens
CAKDVLVWNTAMGFDYW

SEQ ID NO: 37840 - protein, 17 aa, Homo sapiens
CAREVITPADSDAFDIW

SEQ ID NO: 37841 - protein, 24 aa, Homo sapiens
CSTGSRYCTSDSCDGGVKYFFNYW

SEQ ID NO: 37842 - protein, 21 aa, Homo sapiens
CARGLLRTYSSSWYGRGFDYW

SEQ ID NO: 37843 - protein, 18 aa, Homo sapiens
CARLNRRYCSSTSCFDYW

SEQ ID NO: 37844 - protein, 16 aa, Homo sapiens
CARGSWFGEWDYFDNW

SEQ ID NO: 37845 - protein, 20 aa, Homo sapiens
CARDLFITIFGVVTHAFDIW

SEQ ID NO: 37846 - protein, 18 aa, Homo sapiens
CARDLTVTTRRGYYFDYW

SEQ ID NO: 37847 - protein, 31 aa, Homo sapiens
CAKDWNTYYDFWSGYAGPLGGDYYYYGMDVW

SEQ ID NO: 37848 - protein, 23 aa, Homo sapiens
CATGVPVQLERRGGYYYYGMDVW

SEQ ID NO: 37849 - protein, 23 aa, Homo sapiens
CAKDSDPIIVVVPAAMDGGLDYW

SEQ ID NO: 37850 - protein, 29 aa, Homo sapiens
CAKDSAYYDILTGYLYFPSNYYYYGMDVW

SEQ ID NO: 37851 - protein, 19 aa, Homo sapiens
CARDHMGARPDYYYGMDVW

SEQ ID NO: 37852 - protein, 15 aa, Homo sapiens
CARHGGWGDDNFDYW

SEQ ID NO: 37853 - protein, 18 aa, Homo sapiens
CARHAQLWLAVNVYFDLW

SEQ ID NO: 37854 - protein, 21 aa, Homo sapiens
CAKDFLERSSSWVWGVYFDYW

SEQ ID NO: 37855 - protein, 20 aa, Homo sapiens
CARDNVNQGYYYYYYGMDVW

SEQ ID NO: 37856 - protein, 17 aa, Homo sapiens
CARISGYYTLENWFDPW

SEQ ID NO: 37857 - protein, 14 aa, Homo sapiens
CAKSFISYWYFDLW

SEQ ID NO: 37858 - protein, 13 aa, Homo sapiens
CAGLGAAGWFDPW

SEQ ID NO: 37859 - protein, 13 aa, Homo sapiens
CAGFLGFFYFDPW

SEQ ID NO: 37860 - protein, 17 aa, Homo sapiens
CAKDRWTRAVAGAFDYW

SEQ ID NO: 37861 - protein, 12 aa, Homo sapiens
CAREPSYYFDYW

SEQ ID NO: 37862 - protein, 14 aa, Homo sapiens
CAREGLRFLEFDYW

SEQ ID NO: 37863 - protein, 21 aa, Homo sapiens
CARCPRPGLLWFGEFAWFDPW

SEQ ID NO: 37864 - protein, 20 aa, Homo sapiens
CARHRTDPTTVVTEGAFDYW

SEQ ID NO: 37865 - protein, 20 aa, Homo sapiens
CARDPTFRPVTLDNVYFDYW

SEQ ID NO: 37866 - protein, 22 aa, Homo sapiens
CVKAGEVHYNDVSGYRSYFDNW

SEQ ID NO: 37867 - protein, 12 aa, Homo sapiens
CAREKDFGLDYW

SEQ ID NO: 37868 - protein, 25 aa, Homo sapiens
CARGSVSITMMVVVFIGGSYYFDYW

SEQ ID NO: 37869 - protein, 31 aa, Homo sapiens
CARDSRESMGPYYDFWSGYYVRYYYYGMDVW

SEQ ID NO: 37870 - protein, 19 aa, Homo sapiens
CAKDSCSTANCYHDWFDPW

SEQ ID NO: 37871 - protein, 16 aa, Homo sapiens
CATAYSYSSSWYIDYW

SEQ ID NO: 37872 - protein, 18 aa, Homo sapiens
CARGKGEVRGVMSWFDPW

SEQ ID NO: 37873 - protein, 20 aa, Homo sapiens
CARVGPTIFGVVTNPSFDYW

SEQ ID NO: 37874 - protein, 16 aa, Homo sapiens
CVKSHSGSLYSAMDVW

SEQ ID NO: 37875 - protein, 19 aa, Homo sapiens
CARWEEEEMATITGWFDPW

SEQ ID NO: 37876 - protein, 12 aa, Homo sapiens
CVRDWAWAFDYW

SEQ ID NO: 37877 - protein, 15 aa, Homo sapiens
CVRDLRPDGRSGDYW

SEQ ID NO: 37878 - protein, 21 aa, Homo sapiens
CATLPAGVLRFLDGRNWFDPW

SEQ ID NO: 37879 - protein, 16 aa, Homo sapiens
CAKTLYGGYNSPFDYW

SEQ ID NO: 37880 - protein, 15 aa, Homo sapiens
CARMLAAAGTGLDYW

SEQ ID NO: 37881 - protein, 15 aa, Homo sapiens
CARPPRQHLDAFHIW

SEQ ID NO: 37882 - protein, 23 aa, Homo sapiens
CAREGHGIYDILTGYYTYYFDYW

SEQ ID NO: 37883 - protein, 21 aa, Homo sapiens
CTTAKSGSSGYYEWDYYFDYW

SEQ ID NO: 37884 - protein, 16 aa, Homo sapiens
CAKDMMVVAGYVFDQW

SEQ ID NO: 37885 - protein, 20 aa, Homo sapiens
CARDDSREVYSSGEMGYDYW

SEQ ID NO: 37886 - protein, 16 aa, Homo sapiens
CAREEAVAGARYFDLW

SEQ ID NO: 37887 - protein, 15 aa, Homo sapiens
CARDTYDISAYYAYW

SEQ ID NO: 37888 - protein, 17 aa, Homo sapiens
CAREIEYEFVSRVFDYW

SEQ ID NO: 37889 - protein, 15 aa, Homo sapiens
CASSIAVAASGFDYW

SEQ ID NO: 37890 - protein, 18 aa, Homo sapiens
CARYGAAYSSNLNYFDSW

SEQ ID NO: 37891 - protein, 14 aa, Homo sapiens
CARHYTWGSPFDYW

SEQ ID NO: 37892 - protein, 13 aa, Homo sapiens
CTRVTRTFYYDTW

SEQ ID NO: 37893 - protein, 19 aa, Homo sapiens
CAAPLGGPWDVGEVTFDYW

SEQ ID NO: 37894 - protein, 25 aa, Homo sapiens
CARDFAYCSGGSCSRVDYYYGMDVW

SEQ ID NO: 37895 - protein, 22 aa, Homo sapiens
CARDPTSYYDFWSGYQYYFDYW

SEQ ID NO: 37896 - protein, 14 aa, Homo sapiens
CARHFRGWNAFDYW

SEQ ID NO: 37897 - protein, 24 aa, Homo sapiens
CARDPQYYYESSGYYEDASRFDYW

SEQ ID NO: 37898 - protein, 20 aa, Homo sapiens
CATAGYSSGWFRNHWYFDLW

SEQ ID NO: 37899 - protein, 19 aa, Homo sapiens
CARAVDDYGDYVATDRDYW

SEQ ID NO: 37900 - protein, 26 aa, Homo sapiens
CARDRALYYDFWSVIEEHYYYGMDVW

SEQ ID NO: 37901 - protein, 18 aa, Homo sapiens
CTTEHLYYDFWSGYSDYW

SEQ ID NO: 37902 - protein, 16 aa, Homo sapiens
CAREGEAVAGTGPDYW

SEQ ID NO: 37903 - protein, 21 aa, Homo sapiens
CAKDLYYDFWSGRPEEREDYW

SEQ ID NO: 37904 - protein, 14 aa, Homo sapiens
CQSSDSSRSGSRVF

SEQ ID NO: 37905 - protein, 19 aa, Homo sapiens
CTTDGVWELSYYYYGMDVW

SEQ ID NO: 37906 - protein, 19 aa, Homo sapiens
CARLGTVAGDGVYEYFEDW

SEQ ID NO: 37907 - protein, 19 aa, Homo sapiens
CAREEGDYGDYWFGWFDPW

SEQ ID NO: 37908 - protein, 15 aa, Homo sapiens
CALPISGTAYSIDYW

SEQ ID NO: 37909 - protein, 19 aa, Homo sapiens
CARVHRILLETIHDAFDIW

SEQ ID NO: 37910 - protein, 17 aa, Homo sapiens
CARSDSSGWYGGAFDIW

SEQ ID NO: 37911 - protein, 22 aa, Homo sapiens
CAGTVVITTGPEYYYYYGMDVW

SEQ ID NO: 37912 - protein, 18 aa, Homo sapiens
CAKEPGVYNWNDGEIDYW

SEQ ID NO: 37913 - protein, 33 aa, Homo sapiens
CAKLPVQHYDYVWGSYRLAAELGGYYYYGMDVW

SEQ ID NO: 37914 - protein, 27 aa, Homo sapiens
CARDLGVVESEKYYDFWSGYYPHFDYW

SEQ ID NO: 37915 - protein, 17 aa, Homo sapiens
CARHVRIYPSLYYFDSW

SEQ ID NO: 37916 - protein, 25 aa, Homo sapiens
CAKDLGHQPYSVVVTDFYYYGMDVW

SEQ ID NO: 37917 - protein, 21 aa, Homo sapiens
CATLASYYDSIPAYYYGMDVW

SEQ ID NO: 37918 - protein, 19 aa, Homo sapiens
CATGTPFLTGTRSPWFDPW

SEQ ID NO: 37919 - protein, 14 aa, Homo sapiens
CAWTRGRGGFFDPW

SEQ ID NO: 37920 - protein, 29 aa, Homo sapiens
CAKDREYYDFWSGYIAPKDYYYYYGMDVW

SEQ ID NO: 37921 - protein, 16 aa, Homo sapiens
CARAIVYTANYYFDYW

SEQ ID NO: 37922 - protein, 14 aa, Homo sapiens
CAILNELSGAFDIW

SEQ ID NO: 37923 - protein, 19 aa, Homo sapiens
CARHYSYGSWLYYYGMDVW

SEQ ID NO: 37924 - protein, 15 aa, Homo sapiens
CARSLAVAGLPNDYW

SEQ ID NO: 37925 - protein, 28 aa, Homo sapiens
CAKDISYYDILTGYIGSGPYYYYGMDVW

SEQ ID NO: 37926 - protein, 16 aa, Homo sapiens
CARGFGTSGNGIFDYW

SEQ ID NO: 37927 - protein, 19 aa, Homo sapiens
CARDSGVWYYDSSPPFDYW

SEQ ID NO: 37928 - protein, 31 aa, Homo sapiens
CARDFTYYDFWSGYLPHSPPLYYYYYGMDVW

SEQ ID NO: 37929 - protein, 16 aa, Homo sapiens
CARQGGSSWYGDFDYW

SEQ ID NO: 37930 - protein, 18 aa, Homo sapiens
CARLGAYHYYYYYYMDVW

SEQ ID NO: 37931 - protein, 27 aa, Homo sapiens
CARPSAGWDYYDILTGYNYYYYGMDVW

SEQ ID NO: 37932 - protein, 12 aa, Homo sapiens
CLQDFDYPVWSF

SEQ ID NO: 37933 - protein, 15 aa, Homo sapiens
CARLLVNGQLVPDYW

SEQ ID NO: 37934 - protein, 24 aa, Homo sapiens
CARVGNVLLWFGELEDPNNWFDPW

SEQ ID NO: 37935 - protein, 25 aa, Homo sapiens
CARDCGSGFTMIRGDIRGCNWLDPW

SEQ ID NO: 37936 - protein, 24 aa, Homo sapiens
CAKSPFLYDSSGYYYDNPYYFDYW

SEQ ID NO: 37937 - protein, 22 aa, Homo sapiens
CARGDPTDDYGDFVTPAGFVYW

SEQ ID NO: 37938 - protein, 17 aa, Homo sapiens
CAKMTDPVVTGGDFEYW

SEQ ID NO: 37939 - protein, 18 aa, Homo sapiens
CARPYCSGGSCYFSFDYW

SEQ ID NO: 37940 - protein, 25 aa, Homo sapiens
CAHRRLSSGLVTIFGVVTFDAFDIW

SEQ ID NO: 37941 - protein, 20 aa, Homo sapiens
CARDRMVDDILTGDWYFDLW

SEQ ID NO: 37942 - protein, 17 aa, Homo sapiens
CAKDQVVVVTAHYFDYW

SEQ ID NO: 37943 - protein, 24 aa, Homo sapiens
CARGRSPGQQLAQYYYYYYGMDVW

SEQ ID NO: 37944 - protein, 11 aa, Homo sapiens
CQHYNNWLGTF

SEQ ID NO: 37945 - protein, 19 aa, Homo sapiens
CVKPLPSCGGDCSYYFDYW

SEQ ID NO: 37946 - protein, 19 aa, Homo sapiens
CARDQPTIFGVVIKGFDYW

SEQ ID NO: 37947 - protein, 21 aa, Homo sapiens
CARSADMDEYSSGWDPFFDYW

SEQ ID NO: 37948 - protein, 16 aa, Homo sapiens
CASSTVTTLVYYFDYW

SEQ ID NO: 37949 - protein, 20 aa, Homo sapiens
CARSGGLWFGELLFSWFDPW

SEQ ID NO: 37950 - protein, 18 aa, Homo sapiens
CAREENTVVAGSGWFDPW

SEQ ID NO: 37951 - protein, 19 aa, Homo sapiens
CARDFGTAMVKYYYGMDVW

SEQ ID NO: 37952 - protein, 26 aa, Homo sapiens
CARVATMIVVVDSDVTPGSYNWFDPW

SEQ ID NO: 37953 - protein, 35 aa, Homo sapiens
CALPISDTAVYYCARDARNYDSSGYYYVEPYFDYW

SEQ ID NO: 37954 - protein, 17 aa, Homo sapiens
CAKGVTTVTSQYYFDYW

SEQ ID NO: 37955 - protein, 18 aa, Homo sapiens
CARLILPDYSNYFWFDPW

SEQ ID NO: 37956 - protein, 20 aa, Homo sapiens
CASGGYGYDFTGYYRQFDYW

SEQ ID NO: 37957 - protein, 15 aa, Homo sapiens
CARSPPKVTGYFDHW

SEQ ID NO: 37958 - protein, 21 aa, Homo sapiens
CAVVVVPAAMAYYYYYGMDVW

SEQ ID NO: 37959 - protein, 17 aa, Homo sapiens
CAMTFGISYWLYYFDYW

SEQ ID NO: 37960 - protein, 18 aa, Homo sapiens
CARETINYGGNDWYFDLW

SEQ ID NO: 37961 - protein, 19 aa, Homo sapiens
CARDLNTGYYYDSSGFDYW

SEQ ID NO: 37962 - protein, 27 aa, Homo sapiens
CAREKGFSTTVVTRGDYYYYYYGMDVW

SEQ ID NO: 37963 - protein, 14 aa, Homo sapiens
CAVSYSSPTRADYW

SEQ ID NO: 37964 - protein, 23 aa, Homo sapiens
CARDQVQSTIFGVPSYYYGMDVW

SEQ ID NO: 37965 - protein, 16 aa, Homo sapiens
CARLRGDFNPVYFDYW

SEQ ID NO: 37966 - protein, 15 aa, Homo sapiens
CATHSSSWNTHFDYW

SEQ ID NO: 37967 - protein, 15 aa, Homo sapiens
CAREPGLPPETTDYW

SEQ ID NO: 37968 - protein, 16 aa, Homo sapiens
CATSWAVAVAGPIDYW

SEQ ID NO: 37969 - protein, 20 aa, Homo sapiens
CARMVWQLVPVYYYYGMDVW

SEQ ID NO: 37970 - protein, 23 aa, Homo sapiens
CARAPFPYSSSWDLSYYYGMDVW

SEQ ID NO: 37971 - protein, 20 aa, Homo sapiens
CARVRDRSGWPDGSGGFDYW

SEQ ID NO: 37972 - protein, 17 aa, Homo sapiens
CAKEQSSGWYRSYFDYW

SEQ ID NO: 37973 - protein, 21 aa, Homo sapiens
CARETAEVVLMVYAINYFDYW

SEQ ID NO: 37974 - protein, 17 aa, Homo sapiens
CARRGRSDLLHSHFDLW

SEQ ID NO: 37975 - protein, 21 aa, Homo sapiens
CAREWWADSYGPFYYYGMDVW

SEQ ID NO: 37976 - protein, 18 aa, Homo sapiens
CANQASRGPTFYWYFVLW

SEQ ID NO: 37977 - protein, 18 aa, Homo sapiens
CATAPAVRGSSGFWFDPW

SEQ ID NO: 37978 - protein, 21 aa, Homo sapiens
CARRPETPRSYYDSSGHIDYW

SEQ ID NO: 37979 - protein, 15 aa, Homo sapiens
CAREWVGATFAIDYW

SEQ ID NO: 37980 - protein, 20 aa, Homo sapiens
CARARGFVDSDFAGDFFDFW

SEQ ID NO: 37981 - protein, 27 aa, Homo sapiens
CAKDQKYYDILTGYILASYYYYGMDVW

SEQ ID NO: 37982 - protein, 16 aa, Homo sapiens
CARDPGFTMTEYFQHW

SEQ ID NO: 37983 - protein, 20 aa, Homo sapiens
CSRGGSVFHFRGAYSHSDYW

SEQ ID NO: 37984 - protein, 17 aa, Homo sapiens
CARDFSGQQLVSWFDPW

SEQ ID NO: 37985 - protein, 18 aa, Homo sapiens
CTRSLENWNYYYYGMDVW

SEQ ID NO: 37986 - protein, 18 aa, Homo sapiens
CARDHYDFWSGYLPMDYW

SEQ ID NO: 37987 - protein, 23 aa, Homo sapiens
CTTDFWWIQLWGVTPKTSYFDYW

SEQ ID NO: 37988 - protein, 24 aa, Homo sapiens
CARDLAVAGTFLTPGYYYYGMDVW

SEQ ID NO: 37989 - protein, 21 aa, Homo sapiens
CARDTVTTVLVPAYYYGMDVW

SEQ ID NO: 37990 - protein, 19 aa, Homo sapiens
CARDLEGINWNSYYWFDPW

SEQ ID NO: 37991 - protein, 10 aa, Homo sapiens
CQAWDSSISF

SEQ ID NO: 37992 - protein, 18 aa, Homo sapiens
CARQVGARSYSYYGMDVW

SEQ ID NO: 37993 - protein, 23 aa, Homo sapiens
CATAGPLYCSGGSCRMYNWFDPW

SEQ ID NO: 37994 - protein, 18 aa, Homo sapiens
CAKDYSGYCNSPSCDDYW

SEQ ID NO: 37995 - protein, 20 aa, Homo sapiens
CARHLRPGWLVAATTLFDYW

SEQ ID NO: 37996 - protein, 15 aa, Homo sapiens
CANFNPMNLGASDIW

SEQ ID NO: 37997 - protein, 17 aa, Homo sapiens
CARVLTCGGDCWYFDLW

SEQ ID NO: 37998 - protein, 21 aa, Homo sapiens
CARGTSFVVVVAATEFWFDPW

SEQ ID NO: 37999 - protein, 19 aa, Homo sapiens
CARDKIYHGIVVVPAVDYW

SEQ ID NO: 38000 - protein, 11 aa, Homo sapiens
CARDWGYSIYW

SEQ ID NO: 38001 - protein, 18 aa, Homo sapiens
CARGVLGPAATYNWFDPW

SEQ ID NO: 38002 - protein, 20 aa, Homo sapiens
CARGHSRWDKAFVNWYFDLW

SEQ ID NO: 38003 - protein, 19 aa, Homo sapiens
CARRNFDFWRQYSNYFDPW

SEQ ID NO: 38004 - protein, 16 aa, Homo sapiens
CLSADSSGTYGGPYVF

SEQ ID NO: 38005 - protein, 16 aa, Homo sapiens
CVNPRYCSGGSCYDYW

SEQ ID NO: 38006 - protein, 27 aa, Homo sapiens
CARRWRRDCSGGSCYFRYYYYYGMDVW

SEQ ID NO: 38007 - protein, 16 aa, Homo sapiens
CAKADILGNKRYFDYW

SEQ ID NO: 38008 - protein, 13 aa, Homo sapiens
CARHVGRWYHDYW

SEQ ID NO: 38009 - protein, 19 aa, Homo sapiens
CATGPAVDINWNYNWFDPW

SEQ ID NO: 38010 - protein, 18 aa, Homo sapiens
CARVQYSYDFSPGASDYW

SEQ ID NO: 38011 - protein, 23 aa, Homo sapiens
CARGRIAVAGFLGNYYYYGMDVW

SEQ ID NO: 38012 - protein, 16 aa, Homo sapiens
CARHSAVVARHYFDYW

SEQ ID NO: 38013 - protein, 22 aa, Homo sapiens
CARVGYGDYKRRNYYYYGMDVW

SEQ ID NO: 38014 - protein, 21 aa, Homo sapiens
CAKDDTDSSGWYHYYYGMDVW

SEQ ID NO: 38015 - protein, 25 aa, Homo sapiens
CARLTSRWGLYCSGGSCYRGSFDYW

SEQ ID NO: 38016 - protein, 20 aa, Homo sapiens
CASGLNMVRGVIIPHYFDYW

SEQ ID NO: 38017 - protein, 16 aa, Homo sapiens
CATGTALVRGNWFDPW

SEQ ID NO: 38018 - protein, 21 aa, Homo sapiens
CAKEGSNDYGSMTHGFALDIW

SEQ ID NO: 38019 - protein, 25 aa, Homo sapiens
CARELGYCSSTSCPESWYYYGMDVW

SEQ ID NO: 38020 - protein, 22 aa, Homo sapiens
CARHNSYSSGWYGSYYYGMDVW

SEQ ID NO: 38021 - protein, 18 aa, Homo sapiens
CARVPVLWFGELYWFDPW

SEQ ID NO: 38022 - protein, 20 aa, Homo sapiens
CGRVPGILSGYDTPYYVDQW

SEQ ID NO: 38023 - protein, 25 aa, Homo sapiens
CTTDRDYYGSGSYLRLASNWYFDLW

SEQ ID NO: 38024 - protein, 18 aa, Homo sapiens
CARDHQLSPAYLDYFDYW

SEQ ID NO: 38025 - protein, 22 aa, Homo sapiens
CAREDENSVLSSGWYAGWFDPW

SEQ ID NO: 38026 - protein, 19 aa, Homo sapiens
CASIAAAGTLYYYYGMDVW

SEQ ID NO: 38027 - protein, 28 aa, Homo sapiens
CARDPNPRYYYGSGSTQSPMASVDFDYW

SEQ ID NO: 38028 - protein, 20 aa, Homo sapiens
CAREFSVWWLLHWTLGFDYW

SEQ ID NO: 38029 - protein, 14 aa, Homo sapiens
CARLLSRSWIFDYW

SEQ ID NO: 38030 - protein, 17 aa, Homo sapiens
CAKDLEPRGFSGYHDFW

SEQ ID NO: 38031 - protein, 17 aa, Homo sapiens
CARQSRQLVRLGWFDPW

SEQ ID NO: 38032 - protein, 13 aa, Homo sapiens
CARGLWTEERDYW

SEQ ID NO: 38033 - protein, 12 aa, Homo sapiens
CVLEAMVRFDYW

SEQ ID NO: 38034 - protein, 13 aa, Homo sapiens
CESEVVTATTDYW

SEQ ID NO: 38035 - protein, 25 aa, Homo sapiens
CARDHYYGSGSYYGRGFSSYYFDYW

SEQ ID NO: 38036 - protein, 23 aa, Homo sapiens
CARLVYYGSGDYYNGLENWFDPW

SEQ ID NO: 38037 - protein, 22 aa, Homo sapiens
CAFSYYYGSGSYLWYYYGMDVW

SEQ ID NO: 38038 - protein, 18 aa, Homo sapiens
CVRMFPTSVLNPYAMDVW

SEQ ID NO: 38039 - protein, 15 aa, Homo sapiens
CARRGAYYTGRHDYW

SEQ ID NO: 38040 - protein, 18 aa, Homo sapiens
CATSGAGIVVVPAASDYW

SEQ ID NO: 38041 - protein, 13 aa, Homo sapiens
CARYLNEDYFDYW

SEQ ID NO: 38042 - protein, 22 aa, Homo sapiens
CARHASYDFWSGYVSGYYFDYW

SEQ ID NO: 38043 - protein, 18 aa, Homo sapiens
CAREAIDSSSWYAPHDYW

SEQ ID NO: 38044 - protein, 19 aa, Homo sapiens
CARSDRVMATALRYAMDVW

SEQ ID NO: 38045 - protein, 18 aa, Homo sapiens
CARFVTGYSSSWGHIDYW

SEQ ID NO: 38046 - protein, 19 aa, Homo sapiens
CATEQFSSTPGTGAWFDSW

SEQ ID NO: 38047 - protein, 24 aa, Homo sapiens
CARSGWAIAAAGKPYYYYYGMDVW

SEQ ID NO: 38048 - protein, 21 aa, Homo sapiens
CATGLVDTAMVNYYYYGMDVW

SEQ ID NO: 38049 - protein, 22 aa, Homo sapiens
CARIPVEMATIGYYYYYGMDVW

SEQ ID NO: 38050 - protein, 20 aa, Homo sapiens
CARHGVGSSWYGGYNWFDPW

SEQ ID NO: 38051 - protein, 19 aa, Homo sapiens
CARNIGDNWKMNPDAFDIW

SEQ ID NO: 38052 - protein, 28 aa, Homo sapiens
CAKHYDPIDDLISVMAVVVSSRSAFDMW

SEQ ID NO: 38053 - protein, 26 aa, Homo sapiens
CARERSYYDILTGYYPPYYYYGMDVW

SEQ ID NO: 38054 - protein, 18 aa, Homo sapiens
CARTEGLFHIAPFYVDFW

SEQ ID NO: 38055 - protein, 21 aa, Homo sapiens
CARDRGGDTHHAYYYYGMDVW

SEQ ID NO: 38056 - protein, 17 aa, Homo sapiens
CARLDVDTAMVTFFDYW

SEQ ID NO: 38057 - protein, 18 aa, Homo sapiens
CARDQTSSSWENDAFDIW

SEQ ID NO: 38058 - protein, 22 aa, Homo sapiens
CATGDYPPGISWHYYYYGMDVW

SEQ ID NO: 38059 - protein, 16 aa, Homo sapiens
CVCDCTNGSPHNLDYW

SEQ ID NO: 38060 - protein, 26 aa, Homo sapiens
CAKDLTYYDFWSGYYPPYYYYGMDFW

SEQ ID NO: 38061 - protein, 16 aa, Homo sapiens
CAKDTYSFRSPSFDSW

SEQ ID NO: 38062 - protein, 17 aa, Homo sapiens
CARHYRPTTVPNWFDPW

SEQ ID NO: 38063 - protein, 39 aa, Homo sapiens
CLYLDMYSLRPEDTALYYCAKEGSNDYGSMTHGFALDIW

SEQ ID NO: 38064 - protein, 20 aa, Homo sapiens
CAKRQEVFELRFGGDGLDVW

SEQ ID NO: 38065 - protein, 11 aa, Homo sapiens
CNWNYGDFDYW

SEQ ID NO: 38066 - protein, 17 aa, Homo sapiens
CATPLFNYYYYYGMDVW

SEQ ID NO: 38067 - protein, 18 aa, Homo sapiens
CVRVRIQLWLGEDAFDIW

SEQ ID NO: 38068 - protein, 25 aa, Homo sapiens
CARGGAGDFWIWSGYYSPPNVFDYW

SEQ ID NO: 38069 - protein, 21 aa, Homo sapiens
CARATREVLWFGEPINWFDPW

SEQ ID NO: 38070 - protein, 26 aa, Homo sapiens
CARGIPSQDPITMIVVVITTGPFDYW

SEQ ID NO: 38071 - protein, 21 aa, Homo sapiens
CARDGFGWQQLRNYYYGMDVW

SEQ ID NO: 38072 - protein, 25 aa, Homo sapiens
CATAIVVVPAAMFGRYYYYYGMDVW

SEQ ID NO: 38073 - protein, 20 aa, Homo sapiens
CARDPTTVTSLVYYYGMDVW

SEQ ID NO: 38074 - protein, 25 aa, Homo sapiens
CARDKLVATIEMAREVYYYYGMDVW

SEQ ID NO: 38075 - protein, 28 aa, Homo sapiens
CAKDYDAIDDLISVMVVVISTRSAIDIW

SEQ ID NO: 38076 - protein, 13 aa, Homo sapiens
CSRGSAAAAFDYW

SEQ ID NO: 38077 - protein, 28 aa, Homo sapiens
CARDPLYYDILTGYLSPISYYYYGMDVW

SEQ ID NO: 38078 - protein, 17 aa, Homo sapiens
CARHVDYYDSSARFDYW

SEQ ID NO: 38079 - protein, 16 aa, Homo sapiens
CAKKYSSGWYYLLDYW

SEQ ID NO: 38080 - protein, 31 aa, Homo sapiens
CARLTPGYYDFWSGYYTDRGRQHVKYYFDYW

SEQ ID NO: 38081 - protein, 16 aa, Homo sapiens
CARGRGRGINDAFDIW

SEQ ID NO: 38082 - protein, 25 aa, Homo sapiens
CAREPPRYFDWLLIGGYYYYGMDVW

SEQ ID NO: 38083 - protein, 30 aa, Homo sapiens
CAKDLNDYDFWSGYYISRQGYYYYYGMDVW

SEQ ID NO: 38084 - protein, 21 aa, Homo sapiens
CARSAKNDYGDKGREYYFDDW

SEQ ID NO: 38085 - protein, 30 aa, Homo sapiens
CAKDRRYYDFWSGYFMETPYYYYYYGMDVW

SEQ ID NO: 38086 - protein, 13 aa, Homo sapiens
CARALSTNYVSYW

SEQ ID NO: 38087 - protein, 13 aa, Homo sapiens
CVKGWRTGDPDYW

SEQ ID NO: 38088 - protein, 24 aa, Homo sapiens
CAHCYNVLRYFDWLPTPHNWFDPW

SEQ ID NO: 38089 - protein, 23 aa, Homo sapiens
CARESNLWSGYNRLGYYYGMDVW

SEQ ID NO: 38090 - protein, 21 aa, Homo sapiens
CAHFIRSITIFGVVTVKFDYW

SEQ ID NO: 38091 - protein, 21 aa, Homo sapiens
CARPGKFYYDGGSYSPPVDYW

SEQ ID NO: 38092 - protein, 19 aa, Homo sapiens
CAASGEEAAGFYYYGMDVW

SEQ ID NO: 38093 - protein, 16 aa, Homo sapiens
CAKDLGDGAATSPDYW

SEQ ID NO: 38094 - protein, 25 aa, Homo sapiens
CARVGRGGTYCSGGSCRRAPYFDYW

SEQ ID NO: 38095 - protein, 13 aa, Homo sapiens [sequence omitted]

SEQ ID NO: 38096 - protein, 20 aa, Homo sapiens
CARHARYCSGGSCYDWFDPW

SEQ ID NO: 38097 - protein, 30 aa, Homo sapiens
CAKDPGYYDFWSGYLREDLTSYYYYGMDVW

SEQ ID NO: 38098 - protein, 18 aa, Homo sapiens
CAREGGFCSNGLCSFDYW

SEQ ID NO: 38099 - protein, 16 aa, Homo sapiens
CARDKMTVTTDGMDVW

SEQ ID NO: 38100 - protein, 16 aa, Homo sapiens
CARHLREYSYGRLDYW

SEQ ID NO: 38101 - protein, 24 aa, Homo sapiens
CARELERYFDWLFEIYYYYGMDVW

SEQ ID NO: 38102 - protein, 22 aa, Homo sapiens
CARDPTTTTVTTAYYYYGMDVW

SEQ ID NO: 38103 - protein, 16 aa, Homo sapiens
CVKLQPRRQVRAIDYW

SEQ ID NO: 38104 - protein, 16 aa, Homo sapiens
CARQGIAVRYNWFDPW

SEQ ID NO: 38105 - protein, 19 aa, Homo sapiens
CATDPILLYDSSEDYFDYW

SEQ ID NO: 38106 - protein, 16 aa, Homo sapiens
CAKGGIVVPQSYFQHW

SEQ ID NO: 38107 - protein, 15 aa, Homo sapiens
CATSYPYSYGYLGYW

SEQ ID NO: 38108 - protein, 19 aa, Homo sapiens
CARSIYSSGYTNLYYFDYW

SEQ ID NO: 38109 - protein, 20 aa, Homo sapiens
CARVDDYGDFLGPVNWFDPW

SEQ ID NO: 38110 - protein, 16 aa, Homo sapiens
CARHRVGAPSDAFDIW

SEQ ID NO: 38111 - protein, 18 aa, Homo sapiens
CAAFHHNSRLSSNYFDPW

SEQ ID NO: 38112 - protein, 22 aa, Homo sapiens
CARDEPTTAMVTSSYYYGMDVW

SEQ ID NO: 38113 - protein, 15 aa, Homo sapiens
CAKDRSGYNQPVDYW

SEQ ID NO: 38114 - protein, 26 aa, Homo sapiens
CAKDPAGVPAAMYSSGRLNTYYFDYW

SEQ ID NO: 38115 - protein, 14 aa, Homo sapiens
CARGNYGGLTFDYW

SEQ ID NO: 38116 - protein, 23 aa, Homo sapiens
CARDIAALRYFDWLSGPTYFDYW

SEQ ID NO: 38117 - protein, 17 aa, Homo sapiens
CATAYAIFGVVTPPDYW

SEQ ID NO: 38118 - protein, 15 aa, Homo sapiens
CAKRDSSSTRCFDYW

SEQ ID NO: 38119 - protein, 21 aa, Homo sapiens
CARHFGLLWGWSERGNWFDPW

SEQ ID NO: 38120 - protein, 18 aa, Homo sapiens
CTTGYDYVNYYYYGMDVW

SEQ ID NO: 38121 - protein, 13 aa, Homo sapiens
CARMESSGDFEYW

SEQ ID NO: 38122 - protein, 17 aa, Homo sapiens
CSHAVAGNHYYYGMDVW

SEQ ID NO: 38123 - protein, 18 aa, Homo sapiens
CAKQIERWLQDTYYFDNW

SEQ ID NO: 38124 - protein, 22 aa, Homo sapiens
CARSLPDYYDSSDYYYYGMDVW

SEQ ID NO: 38125 - protein, 21 aa, Homo sapiens
CTTDDPYYDILTGYYRTFDYW

SEQ ID NO: 38126 - protein, 23 aa, Homo sapiens
CAKTLNTMDMITFGGVIAPFDYW

SEQ ID NO: 38127 - protein, 18 aa, Homo sapiens
CARLPGGWLQLESYIDYW

SEQ ID NO: 38128 - protein, 20 aa, Homo sapiens
CARDQELGYCSGGSCYNDYW

SEQ ID NO: 38129 - protein, 14 aa, Homo sapiens
CARDLSSGWTVDYW

SEQ ID NO: 38130 - protein, 32 aa, Homo sapiens
CAKDLLYYDILTGYTPPLAAPKYYYYYGMDVW

SEQ ID NO: 38131 - protein, 19 aa, Homo sapiens
CATASPFGIVGATVWFDPW

SEQ ID NO: 38132 - protein, 19 aa, Homo sapiens
CAKDQPAIVVVISYYFDYW

SEQ ID NO: 38133 - protein, 23 aa, Homo sapiens
CAKAAGRYYDILTGYYYYGMDVW

SEQ ID NO: 38134 - protein, 27 aa, Homo sapiens
CARDGPNCDFWSGYYPGVNYYYGMDVW

SEQ ID NO: 38135 - protein, 16 aa, Homo sapiens
CASGYDYGDYVSFAYW

SEQ ID NO: 38136 - protein, 19 aa, Homo sapiens
CAASVVALLSQCDNWFDPW

SEQ ID NO: 38137 - protein, 17 aa, Homo sapiens
CASPPGIAVAGTGFWYW

SEQ ID NO: 38138 - protein, 17 aa, Homo sapiens
CAKGLVEMATPRYFDYW

SEQ ID NO: 38139 - protein, 22 aa, Homo sapiens
CARDRKDDGSGYYRWGDSFDIW

SEQ ID NO: 38140 - protein, 14 aa, Homo sapiens
CARDLTNHGIFDFW

SEQ ID NO: 38141 - protein, 15 aa, Homo sapiens
CATIQLWSKFYFDYW

SEQ ID NO: 38142 - protein, 22 aa, Homo sapiens
CARDPLYYYDSSGYYPSHFDYW

SEQ ID NO: 38143 - protein, 28 aa, Homo sapiens
CARDIIPFSWETAMVIYTNPKYNWFDPW

SEQ ID NO: 38144 - protein, 24 aa, Homo sapiens
CARHFHRLDYVWGSYRYLFYFDYW

SEQ ID NO: 38145 - protein, 12 aa, Homo sapiens
CQQLIGYPQATF

SEQ ID NO: 38146 - protein, 16 aa, Homo sapiens
CVRDGTFGGVTSFDYW

SEQ ID NO: 38147 - protein, 27 aa, Homo sapiens
CARDPQGITIFGVVTYDPYYYYGMDVW

SEQ ID NO: 38148 - protein, 22 aa, Homo sapiens
CTTDDPYYYDSSGYYRSPHDYW

SEQ ID NO: 38149 - protein, 16 aa, Homo sapiens
CARFNWDYPDSWFDPW

SEQ ID NO: 38150 - protein, 17 aa, Homo sapiens
CARDSTPTVSGDAFDYW

SEQ ID NO: 38151 - protein, 10 aa, Homo sapiens
CARGRGFDSW

SEQ ID NO: 38152 - protein, 18 aa, Homo sapiens
CARVGALNGRYYYGMDVW

SEQ ID NO: 38153 - protein, 21 aa, Homo sapiens
CARDPSFWNGYYAYYYGMDVW

SEQ ID NO: 38154 - protein, 22 aa, Homo sapiens
CARNFWTTVTWGVYYYYGMDVW

SEQ ID NO: 38155 - protein, 11 aa, Homo sapiens
CQQLNGFPFTF

SEQ ID NO: 38156 - protein, 23 aa, Homo sapiens
CAKDHGYSYGYYDGSSENAFDIW

SEQ ID NO: 38157 - protein, 20 aa, Homo sapiens
CAKDSYYYGSGSFHSWFDSW

SEQ ID NO: 38158 - protein, 19 aa, Homo sapiens
CARAINAGWELSVYYFDHW

SEQ ID NO: 38159 - protein, 25 aa, Homo sapiens
CTTDRWEIEYGEYEDNYSYYGMDVW

SEQ ID NO: 38160 - protein, 23 aa, Homo sapiens
CASLERDYDYVWGSYRPDYFDYW

SEQ ID NO: 38161 - protein, 15 aa, Homo sapiens
CARWDISGGSRFDYW

SEQ ID NO: 38162 - protein, 24 aa, Homo sapiens
CAKDLGIAVAGLLNYYYYYGMDVW

SEQ ID NO: 38163 - protein, 21 aa, Homo sapiens
CARGGDRYDFWSGYYYGMDVW

SEQ ID NO: 38164 - protein, 27 aa, Homo sapiens
CTTDRWTIDYGDYEDPDSYSYYGMDVW

SEQ ID NO: 38165 - protein, 16 aa, Homo sapiens
CAKGRREGTGYYFDYW

SEQ ID NO: 38166 - protein, 24 aa, Homo sapiens
CARLGLGYYGDYRSRGYYYGMDVW

SEQ ID NO: 38167 - protein, 19 aa, Homo sapiens
CARILSSGWNPARYYFDYW

SEQ ID NO: 38168 - protein, 18 aa, Homo sapiens
CARGFYDSSGYQNWFDPW

SEQ ID NO: 38169 - protein, 22 aa, Homo sapiens
CARDSNYYDSSGYYYARSFDYW

SEQ ID NO: 38170 - protein, 15 aa, Homo sapiens
CARDPYSSSAWFDPW

SEQ ID NO: 38171 - protein, 16 aa, Homo sapiens
CARDDLIDGYNSLDYW

SEQ ID NO: 38172 - protein, 27 aa, Homo sapiens
CAREKVLPLTGIAAAWSVYYYYGMDVW

SEQ ID NO: 38173 - protein, 14 aa, Homo sapiens
CAHTMVSSSSPDYW

SEQ ID NO: 38174 - protein, 15 aa, Homo sapiens
CAKEERHGYNQNDSW

SEQ ID NO: 38175 - protein, 23 aa, Homo sapiens
CARVGRTIFGVVIVYYYYGMDVW

SEQ ID NO: 38176 - protein, 29 aa, Homo sapiens
CAKDPRHYDFWSGYMGERAYYYYYGMDVW

SEQ ID NO: 38177 - protein, 15 aa, Homo sapiens
CGTWDFSLRAGDVPF

SEQ ID NO: 38178 - protein, 16 aa, Homo sapiens
CARGEGTVVTPRVDYW

SEQ ID NO: 38179 - protein, 17 aa, Homo sapiens
CARDGQDYLRSHYFDEW

SEQ ID NO: 38180 - protein, 20 aa, Homo sapiens
CVRSALSGEADYRENYFDSW

SEQ ID NO: 38181 - protein, 26 aa, Homo sapiens
CARHFRDGDGYNYHRLYVWLGWFDPW

SEQ ID NO: 38182 - protein, 24 aa, Homo sapiens
CARANAPDRSGDGWNNRNFFFDFW

SEQ ID NO: 38183 - protein, 25 aa, Homo sapiens
CARGRGMEMVLTRRIPRSKFAFDIW

SEQ ID NO: 38184 - protein, 17 aa, Homo sapiens
CAKDLINLILTGFFDYW

SEQ ID NO: 38185 - protein, 22 aa, Homo sapiens
CASAEVEGIAVAGNYYYGMDVW

SEQ ID NO: 38186 - protein, 31 aa, Homo sapiens
CAKDLTYYDFWSGYFGTQGTNYYYYYGMDVW

SEQ ID NO: 38187 - protein, 20 aa, Homo sapiens
CANYGDYRITLRRYNWFDPW

SEQ ID NO: 38188 - protein, 12 aa, Homo sapiens
CQSGHSSGIRVF

SEQ ID NO: 38189 - protein, 25 aa, Homo sapiens
CARVKEARDYDFWSGYYHSWYFDLW

SEQ ID NO: 38190 - protein, 20 aa, Homo sapiens
CARHDAEYSSGWMTKNFDYW

SEQ ID NO: 38191 - protein, 22 aa, Homo sapiens
CARIRFGTPGIGLYYYYGMDVW

SEQ ID NO: 38192 - protein, 18 aa, Homo sapiens
CARLSGSGSYYNSPFDYW

SEQ ID NO: 38193 - protein, 21 aa, Homo sapiens
CATDLRYRISRQGYNSYIDYW

SEQ ID NO: 38194 - protein, 21 aa, Homo sapiens
CARDLTTVVTQDYYYYGMDVW

SEQ ID NO: 38195 - protein, 15 aa, Homo sapiens
CAKDKDIDGWSFDYW

SEQ ID NO: 38196 - protein, 24 aa, Homo sapiens
CARQATTSITIFGVVIMQNWFDPW

SEQ ID NO: 38197 - protein, 18 aa, Homo sapiens
CARGRGSVQLWLPWFDPW

SEQ ID NO: 38198 - protein, 26 aa, Homo sapiens
CARDLGYCSGGSCYAAPRAGRAFDIW

SEQ ID NO: 38199 - protein, 17 aa, Homo sapiens
CAKPRLKRIIPAPADYW

SEQ ID NO: 38200 - protein, 22 aa, Homo sapiens
CARGVAKESYDSWNAYHYFDFW

SEQ ID NO: 38201 - protein, 16 aa, Homo sapiens
CATEFALAVAGRFDYW

SEQ ID NO: 38202 - protein, 22 aa, Homo sapiens
CARQTLYCSGGSCYRYYGMDVW

SEQ ID NO: 38203 - protein, 27 aa, Homo sapiens
CARFRPYYYDSSGYYSWDGSDRGFDYW

SEQ ID NO: 38204 - protein, 19 aa, Homo sapiens
CARERIAVAAPSDNWFDPW

SEQ ID NO: 38205 - protein, 21 aa, Homo sapiens
CARHSLGGTGFYTGTDAFDLW

SEQ ID NO: 38206 - protein, 18 aa, Homo sapiens
CARGAGWELLGMEYFDYW

SEQ ID NO: 38207 - protein, 22 aa, Homo sapiens
CAREGSVLMVYATPSQYYFDYW

SEQ ID NO: 38208 - protein, 17 aa, Homo sapiens
CAKCATGKWSRGPDDYW

SEQ ID NO: 38209 - protein, 19 aa, Homo sapiens
CARALRITIFGVVNHFDYW

SEQ ID NO: 38210 - protein, 25 aa, Homo sapiens
CARGAAYDWGTTIFGVVPYNWFDPW

SEQ ID NO: 38211 - protein, 21 aa, Homo sapiens
CATAPPYCSGGSCYSSWFDPW

SEQ ID NO: 38212 - protein, 16 aa, Homo sapiens
CARDTTVVIPGAFDIW

SEQ ID NO: 38213 - protein, 21 aa, Homo sapiens
CARETLHPGYSSGWYDLKDYW

SEQ ID NO: 38214 - protein, 14 aa, Homo sapiens
CAKVQQWLFGFDPW

SEQ ID NO: 38215 - protein, 29 aa, Homo sapiens
CARDLHYYDILTGYSYQETYYYYYGMDVW

SEQ ID NO: 38216 - protein, 29 aa, Homo sapiens
CARDREYYDFWSGYLRANYYYYYYGMDVW

SEQ ID NO: 38217 - protein, 25 aa, Homo sapiens
CARAGYSSGRSTGNNFYYYYGMDVW

SEQ ID NO: 38218 - protein, 15 aa, Homo sapiens
CARTLGGAAASSDYW

SEQ ID NO: 38219 - protein, 20 aa, Homo sapiens
CARGGEWFGELLYVDWFDPW

SEQ ID NO: 38220 - protein, 23 aa, Homo sapiens
CARDGRYYYGSGGDYYYYGMDVW

SEQ ID NO: 38221 - protein, 18 aa, Homo sapiens
CATSSVVTAIRRNWFDPW

SEQ ID NO: 38222 - protein, 20 aa, Homo sapiens
CAKGPYSYGYFEGRGYFDYW

SEQ ID NO: 38223 - protein, 17 aa, Homo sapiens
CAFSSLRYFGYYGMDVW

SEQ ID NO: 38224 - protein, 16 aa, Homo sapiens
CATESVLRQTNWFDPW

SEQ ID NO: 38225 - protein, 30 aa, Homo sapiens
CAKDRLYYDILTGYLTSEPHYYYYYGMDVW

SEQ ID NO: 38226 - protein, 21 aa, Homo sapiens
CARDTWIQLWSYYYYYGMDVW

SEQ ID NO: 38227 - protein, 29 aa, Homo sapiens
CARDLGEGRNYDILTGFWNNYYYYGMDVW

SEQ ID NO: 38228 - protein, 11 aa, Homo sapiens
CARANFFFDLW

SEQ ID NO: 38229 - protein, 16 aa, Homo sapiens
CARNIRDYGDIHFDYW

SEQ ID NO: 38230 - protein, 22 aa, Homo sapiens
CARDPSTLTGELLDYYYGMDVW

SEQ ID NO: 38231 - protein, 17 aa, Homo sapiens
CARVNNQLPLYNWFDPW

SEQ ID NO: 38232 - protein, 11 aa, Homo sapiens
CATSYWGTDYW

SEQ ID NO: 38233 - protein, 25 aa, Homo sapiens
CAHSGIVVVPAASTYFYYYYGMDVW

SEQ ID NO: 38234 - protein, 17 aa, Homo sapiens
CTTDSPGIAVAGTGDYW

SEQ ID NO: 38235 - protein, 23 aa, Homo sapiens
CARVGYDILTGYRPYYYYGMDVW

SEQ ID NO: 38236 - protein, 24 aa, Homo sapiens
CAKGGSKEQWLVPVPDYYYGMDVW

SEQ ID NO: 38237 - protein, 20 aa, Homo sapiens
CARDLGQQLAIKYYYGMDVW

SEQ ID NO: 38238 - protein, 29 aa, Homo sapiens
CAKDRRGLTPLMITFGGVIVIRGNYFDYW

SEQ ID NO: 38239 - protein, 17 aa, Homo sapiens
CARAGITMIVVNAFDIW

SEQ ID NO: 38240 - protein, 36 aa, Homo sapiens
CALPILNSLRAEDTAVYYCAKPAATYYYYYYGMDVW

SEQ ID NO: 38241 - protein, 14 aa, Homo sapiens [sequence omitted]

SEQ ID NO: 38242 - protein, 26 aa, Homo sapiens
CASGEIVVVPAALGDYYYYYYGMDVW

SEQ ID NO: 38243 - protein, 21 aa, Homo sapiens
CARETTDITMIVVVPVWFDPW

SEQ ID NO: 38244 - protein, 21 aa, Homo sapiens
CARLEEDTAMDYYYYYGMDVW

SEQ ID NO: 38245 - protein, 16 aa, Homo sapiens
CAGSPGYYSGWPFDSW

SEQ ID NO: 38246 - protein, 17 aa, Homo sapiens
CAKDTDPVEYSSSLDYW

SEQ ID NO: 38247 - protein, 19 aa, Homo sapiens
CARDLQGFNDGSGYIFDYW

SEQ ID NO: 38248 - protein, 23 aa, Homo sapiens
CVRDNLYGSANYNEGYYYGMDVW

SEQ ID NO: 38249 - protein, 12 aa, Homo sapiens
CAREVAGIHDYW

SEQ ID NO: 38250 - protein, 15 aa, Homo sapiens
CARDPTIFGVGFDPW

SEQ ID NO: 38251 - protein, 16 aa, Homo sapiens
CARSADSSGYDNVDYW

SEQ ID NO: 38252 - protein, 15 aa, Homo sapiens
CAKESFGVVNLIDYW

SEQ ID NO: 38253 - protein, 13 aa, Homo sapiens
CARMSPVATEDYW

SEQ ID NO: 38254 - protein, 18 aa, Homo sapiens
CARDASFCTTSNCPFDPW

SEQ ID NO: 38255 - protein, 17 aa, Homo sapiens
CAKECYSSAWSSCFDNW

SEQ ID NO: 38256 - protein, 16 aa, Homo sapiens
CVEGWVATGGTSHDYW

SEQ ID NO: 38257 - protein, 11 aa, Homo sapiens [sequence omitted]

SEQ ID NO: 38258 - protein, 18 aa, Homo sapiens
CATDRLNSDWSSSRFHYW

SEQ ID NO: 38259 - protein, 30 aa, Homo sapiens
CARGSNYDILTGYWAALAPTNYYYYGMDVW

SEQ ID NO: 38260 - protein, 14 aa, Homo sapiens
CARDLTQTGSADYW

SEQ ID NO: 38261 - protein, 22 aa, Homo sapiens
CARVSVLRVAAAGTRDYYFDYW

SEQ ID NO: 38262 - protein, 24 aa, Homo sapiens
CARASVDIVATRTQSFYYYGMDVW

SEQ ID NO: 38263 - protein, 28 aa, Homo sapiens
CARQEMGMRGDIVVVVAATPLRNWFDPW

SEQ ID NO: 38264 - protein, 17 aa, Homo sapiens
CARDYRYDSSGPGFDIW

SEQ ID NO: 38265 - protein, 16 aa, Homo sapiens
CARDNWNYRTYYFDYW

SEQ ID NO: 38266 - protein, 25 aa, Homo sapiens
CAKDFRSYYYDSSGYYYGDPSFDYW

SEQ ID NO: 38267 - protein, 27 aa, Homo sapiens
CATVPPTIYYDYVWGSYRTVGQYFQHW

SEQ ID NO: 38268 - protein, 27 aa, Homo sapiens
CAKDISPGYCSSTSCYNDYYYYGMDVW

SEQ ID NO: 38269 - protein, 30 aa, Homo sapiens
CAKDGTYYDFWSGYVLVQEWDYYYYGMDVW

SEQ ID NO: 38270 - protein, 24 aa, Homo sapiens
CARDRADAGEFTLWFGELLPTDYW

SEQ ID NO: 38271 - protein, 24 aa, Homo sapiens
CARGSQYYDFWSGYYTGHYYFDYW

SEQ ID NO: 38272 - protein, 16 aa, Homo sapiens
CARTTSGSYLEPFDYW

SEQ ID NO: 38273 - protein, 27 aa, Homo sapiens
CARHIMVRGGATYYYGGATYYYAMDVW

SEQ ID NO: 38274 - protein, 21 aa, Homo sapiens
CAKDTEGAFLWSPPPYYFDYW

SEQ ID NO: 38275 - protein, 14 aa, Homo sapiens
CARHVSGPWAFDIW

SEQ ID NO: 38276 - protein, 28 aa, Homo sapiens
CARAYQLLLYPDLALLNMPYYYYGMDVW

SEQ ID NO: 38277 - protein, 18 aa, Homo sapiens
CARGHGYHDFWSGQFDSW

SEQ ID NO: 38278 - protein, 28 aa, Homo sapiens
CARDYDPIEDLITMIAVVIRTRSASDIW

SEQ ID NO: 38279 - protein, 22 aa, Homo sapiens
CAKTTSLRYFDYTYYYYGMDVW

SEQ ID NO: 38280 - protein, 19 aa, Homo sapiens
CAKLAGAQLWFFLSLVDYW

SEQ ID NO: 38281 - protein, 25 aa, Homo sapiens
CARDPPVDIVATIWLVDYYYGMDVW

SEQ ID NO: 38282 - protein, 23 aa, Homo sapiens
CARSMVAYYYDSSGYYNNWFDPW

SEQ ID NO: 38283 - protein, 22 aa, Homo sapiens
CATSPAVIEMATISRVGWFDPW

SEQ ID NO: 38284 - protein, 21 aa, Homo sapiens
CASHYYITMIVVVIPHAFDIW

SEQ ID NO: 38285 - protein, 20 aa, Homo sapiens
CARELIVLVAGTSHDAFDIW

SEQ ID NO: 38286 - protein, 23 aa, Homo sapiens
CARDLTSVSSSSPQGYYYGMDVW

SEQ ID NO: 38287 - protein, 22 aa, Homo sapiens
CARDRLLRYFDWNYYYYGMDVW

SEQ ID NO: 38288 - protein, 21 aa, Homo sapiens
CARDHGTYYYDSSAHGTGDYW

SEQ ID NO: 38289 - protein, 12 aa, Homo sapiens
CARWRGDCYDYW

SEQ ID NO: 38290 - protein, 14 aa, Homo sapiens
CARGEDGYNYFDYW

SEQ ID NO: 38291 - protein, 25 aa, Homo sapiens
CARTVLRYFDWLFHSDYYYYGMDVW

SEQ ID NO: 38292 - protein, 20 aa, Homo sapiens
CASGITMVRGVITPTGFDYW

SEQ ID NO: 38293 - protein, 17 aa, Homo sapiens
CARARVVTSNFGWFDPW

SEQ ID NO: 38294 - protein, 22 aa, Homo sapiens
CARHGVGNYDILTGYYRPFDYW

SEQ ID NO: 38295 - protein, 29 aa, Homo sapiens
CAKDAMQEYYYDSSGYSLVRRGLLYFQHW

SEQ ID NO: 38296 - protein, 20 aa, Homo sapiens
CARDWETYNWNDRNWYFDLW

SEQ ID NO: 38297 - protein, 17 aa, Homo sapiens
CARLMKYDILTNWVDPW

SEQ ID NO: 38298 - protein, 23 aa, Homo sapiens
CARAYCFDGVCYTRVGFWYFDIW

SEQ ID NO: 38299 - protein, 22 aa, Homo sapiens
CARVSVVTIFGVVTTPGWFDPW

SEQ ID NO: 38300 - protein, 20 aa, Homo sapiens
CARVPGSRRRDGYNYYFDYW

SEQ ID NO: 38301 - protein, 18 aa, Homo sapiens
CARGGITIFGVVTNLDYW

SEQ ID NO: 38302 - protein, 27 aa, Homo sapiens
CASGKINRLCTGGTCYVANYYYGMDVW

SEQ ID NO: 38303 - protein, 17 aa, Homo sapiens
CARDRKGLSSSWFIDYW

SEQ ID NO: 38304 - protein, 26 aa, Homo sapiens
CATVLGNNCSSTSCYRIYYYYGMDVW

SEQ ID NO: 38305 - protein, 17 aa, Homo sapiens
CARYFRGYSQDTAFDYW

SEQ ID NO: 38306 - protein, 28 aa, Homo sapiens
CARDPPPPDYDFWSGYGSGGYYYGMDVW

SEQ ID NO: 38307 - protein, 21 aa, Homo sapiens
CARRRYYYDSSGQSKDCFDVW

SEQ ID NO: 38308 - protein, 17 aa, Homo sapiens
CARGFGDYASDDAFDIW

SEQ ID NO: 38309 - protein, 25 aa, Homo sapiens
CAKQSPKGDVLLWFGELYFGAFDIW

SEQ ID NO: 38310 - protein, 14 aa, Homo sapiens
CAADGDYHDGFNVW

SEQ ID NO: 38311 - protein, 29 aa, Homo sapiens
CAKDPTYYDFWSGYFPHYNHYYYYGMDVW

SEQ ID NO: 38312 - protein, 26 aa, Homo sapiens
CARDLSTDSYYDYVWGSYRIDAFDIW

SEQ ID NO: 38313 - protein, 20 aa, Homo sapiens
CARHLRNDSSGYSELAFDIW

SEQ ID NO: 38314 - protein, 22 aa, Homo sapiens
CAKDPPFLEWLLPDYYYGMDVW

SEQ ID NO: 38315 - protein, 27 aa, Homo sapiens
CARDFRARTNYYDSSGYSNHHDAFDIW

SEQ ID NO: 38316 - protein, 20 aa, Homo sapiens
CARGLLGSYSSGWAYYFDSW

SEQ ID NO: 38317 - protein, 16 aa, Homo sapiens
CARGHGITYLDAFDIW

SEQ ID NO: 38318 - protein, 20 aa, Homo sapiens
CTTDRLHDYIWGTYRYADYW

SEQ ID NO: 38319 - protein, 19 aa, Homo sapiens
CASLPYSFTVGSPYYFDHW

SEQ ID NO: 38320 - protein, 20 aa, Homo sapiens
CARIRPYSSGWYLTGGFDYW

SEQ ID NO: 38321 - protein, 16 aa, Homo sapiens
CARDSAHRSGWYLDYW

SEQ ID NO: 38322 - protein, 16 aa, Homo sapiens
CAIEDPVLVRAYFDYW

SEQ ID NO: 38323 - protein, 19 aa, Homo sapiens
CASIDEAYSSGWPDAFDIW

SEQ ID NO: 38324 - protein, 14 aa, Homo sapiens
CASWDDSPNGRGLF

SEQ ID NO: 38325 - protein, 30 aa, Homo sapiens
CARAANPDVESYYDFWSGYAKYYYYGMDVW

SEQ ID NO: 38326 - protein, 20 aa, Homo sapiens
CANARRWELLSSPPGGFDYW

SEQ ID NO: 38327 - protein, 21 aa, Homo sapiens
CARWGEFGYCDTTSCSHMDYW

SEQ ID NO: 38328 - protein, 16 aa, Homo sapiens
CARAVALGWGNYFDYW

SEQ ID NO: 38329 - protein, 25 aa, Homo sapiens
CASDEGYYDSSGYRPDYYYYGMDVW

SEQ ID NO: 38330 - protein, 22 aa, Homo sapiens
CAKVGVVRRDSSGYYSYYFDYW

SEQ ID NO: 38331 - protein, 14 aa, Homo sapiens
CARHWGSYRAFDIW

SEQ ID NO: 38332 - protein, 18 aa, Homo sapiens
CAAPHCSSTSCYDGMDVW

SEQ ID NO: 38333 - protein, 19 aa, Homo sapiens
CAKLSYYDSSGYNDAFDIW

SEQ ID NO: 38334 - protein, 23 aa, Homo sapiens
CARGRGGWYVINEIHYYYGMDVW

SEQ ID NO: 38335 - protein, 17 aa, Homo sapiens
CARIRRTVVVAAHFDYW

SEQ ID NO: 38336 - protein, 28 aa, Homo sapiens
CTRHEEMGDYDYESGTSYYYYHYGVDVW

SEQ ID NO: 38337 - protein, 17 aa, Homo sapiens
CASLHSVGAHGDYFDYW

SEQ ID NO: 38338 - protein, 23 aa, Homo sapiens
CARHSSYCSGGSCYLDYYGMDVW

SEQ ID NO: 38339 - protein, 18 aa, Homo sapiens
CARPRATKNYGDLSFDYW

SEQ ID NO: 38340 - protein, 16 aa, Homo sapiens
CAKDRGSSRILWFDPW

SEQ ID NO: 38341 - protein, 13 aa, Homo sapiens [sequence omitted]

SEQ ID NO: 38342 - protein, 19 aa, Homo sapiens
CASTVTIFGVVNTPAFDYW

SEQ ID NO: 38343 - protein, 21 aa, Homo sapiens
CARQSRYSNTWRKTWGSFDYW

SEQ ID NO: 38344 - protein, 32 aa, Homo sapiens
CVKFGQGANVRCVDYDFWSGYSAYYYYGMDVW

SEQ ID NO: 38345 - protein, 16 aa, Homo sapiens
CAAYIAVAAPRAFDIW

SEQ ID NO: 38346 - protein, 21 aa, Homo sapiens
CAREASSSWYGVGRKNWFDPW

SEQ ID NO: 38347 - protein, 22 aa, Homo sapiens
CAHSIGGVIFGVVTDPTHFDYW

SEQ ID NO: 38348 - protein, 19 aa, Homo sapiens
CARDLGTIQLPGDWYFDLW

SEQ ID NO: 38349 - protein, 18 aa, Homo sapiens
CARGGDSVGSKRSSFDIW

SEQ ID NO: 38350 - protein, 18 aa, Homo sapiens
CAREKKREDRGFRAFDIW

SEQ ID NO: 38351 - protein, 22 aa, Homo sapiens
CARADYYDSSGYGDYYYGMDVW

SEQ ID NO: 38352 - protein, 27 aa, Homo sapiens
CARGTGRITIFGVVIMGTDVKSTFDPW

SEQ ID NO: 38353 - protein, 19 aa, Homo sapiens
CAKNLNQLWLLVFDAFDIW

SEQ ID NO: 38354 - protein, 12 aa, Homo sapiens
CARSNNLAFDDW

SEQ ID NO: 38355 - protein, 22 aa, Homo sapiens
CARVHAGYGDYGYYYYYGLDVW

SEQ ID NO: 38356 - protein, 21 aa, Homo sapiens
CARLGNSGYTDFYYYYGMDVW

SEQ ID NO: 38357 - protein, 21 aa, Homo sapiens
CASSAVYYGSGTEPPYAFDIW

SEQ ID NO: 38358 - protein, 24 aa, Homo sapiens
CAAHYCSSTSCPGGLGYYYGMDVW

SEQ ID NO: 38359 - protein, 24 aa, Homo sapiens
CAMGGSMAHSSGWGYYYYYGMDVW

SEQ ID NO: 38360 - protein, 20 aa, Homo sapiens
CATSVGYCSGGSCLNWFDPW

SEQ ID NO: 38361 - protein, 22 aa, Homo sapiens
CTTDYGIWFGEPKRYYYGMDVW

SEQ ID NO: 38362 - protein, 27 aa, Homo sapiens
CARDPERDYYDSSGYYYVHSYWYFDLW

SEQ ID NO: 38363 - protein, 22 aa, Homo sapiens
CAKALGPYCSGGSCYGASTDYW

SEQ ID NO: 38364 - protein, 21 aa, Homo sapiens
CARGGDIVVVVAATRSAFDIW

SEQ ID NO: 38365 - protein, 18 aa, Homo sapiens
CAREPPRIGARPRGFDIW

SEQ ID NO: 38366 - protein, 18 aa, Homo sapiens
CARFGGGDYDNEIGFDYW

SEQ ID NO: 38367 - protein, 21 aa, Homo sapiens
CARDGTGYDSYYYYYYGMDVW

SEQ ID NO: 38368 - protein, 19 aa, Homo sapiens
CARRIRITSVPAKGYFDSW

SEQ ID NO: 38369 - protein, 25 aa, Homo sapiens
CTRHVVDYYDSSGYYATNNLGFDYW

SEQ ID NO: 38370 - protein, 23 aa, Homo sapiens
CARDKTYYDILTGYNVHTWFDPW

SEQ ID NO: 38371 - protein, 21 aa, Homo sapiens
CAKDPGGYSYGSYYYYGMDVW

SEQ ID NO: 38372 - protein, 19 aa, Homo sapiens
CAKDLYSSDWYFRGPFDYW

SEQ ID NO: 38373 - protein, 15 aa, Homo sapiens
CARVSSVAGYYFDYW

SEQ ID NO: 38374 - protein, 23 aa, Homo sapiens
CARPYSSSWHLLAGNYYYGMDVW

SEQ ID NO: 38375 - protein, 21 aa, Homo sapiens
CARPRWLDTSRYYYYYGMDVW

SEQ ID NO: 38376 - protein, 12 aa, Homo sapiens
CARQNVMAYDYW

SEQ ID NO: 38377 - protein, 16 aa, Homo sapiens
CTRVLEGFPRDWFDPW

SEQ ID NO: 38378 - protein, 19 aa, Homo sapiens
CARDNQQPHTNYYYGMDVW

SEQ ID NO: 38379 - protein, 26 aa, Homo sapiens
CARGGESFPTLGYCSGGSCYSAFDIW

SEQ ID NO: 38380 - protein, 23 aa, Homo sapiens
CARGEYSSSPHFFVVYYYGMDVW

SEQ ID NO: 38381 - protein, 25 aa, Homo sapiens
CTRRAEGYCSGGSCYLYYYYGMDVW

SEQ ID NO: 38382 - protein, 13 aa, Homo sapiens
CQLYDTLPPQVTF

SEQ ID NO: 38383 - protein, 19 aa, Homo sapiens
CARQERQWLVLLPNWFDPW

SEQ ID NO: 38384 - protein, 29 aa, Homo sapiens
CAREHPVLVVPAAIQYSSSWYGEYYFDYW

SEQ ID NO: 38385 - protein, 22 aa, Homo sapiens
CARDARNRGNSSPNDPPHFDYW

SEQ ID NO: 38386 - protein, 10 aa, Homo sapiens
CVNGWSADYW

SEQ ID NO: 38387 - protein, 18 aa, Homo sapiens
CARKEQLFHLVPYFFDFW

SEQ ID NO: 38388 - protein, 22 aa, Homo sapiens
CARVGYSYGTRYYYYYYGMDVW

SEQ ID NO: 38389 - protein, 20 aa, Homo sapiens
CARDGRIAAAGTVYWYFDLW

SEQ ID NO: 38390 - protein, 19 aa, Homo sapiens
CARDGYSSSWYLQNWFDPW

SEQ ID NO: 38391 - protein, 22 aa, Homo sapiens
CARVVPITIFGVVTSVGWFDPW

SEQ ID NO: 38392 - protein, 21 aa, Homo sapiens
CAKVTTSFRQGFRPDYYMDVW

SEQ ID NO: 38393 - protein, 25 aa, Homo sapiens
CARVISIAVAGTLFPIYYYYGMDVW

SEQ ID NO: 38394 - protein, 19 aa, Homo sapiens
CANHVATTPYSYGYGMDVW

SEQ ID NO: 38395 - protein, 19 aa, Homo sapiens
CTTEDYDFWSGYLGYFDYW

SEQ ID NO: 38396 - protein, 21 aa, Homo sapiens
CAKDLGETTNWGNYYYGMDVW

SEQ ID NO: 38397 - protein, 18 aa, Homo sapiens
CATSAGIAAADTGWFDPW

SEQ ID NO: 38398 - protein, 24 aa, Homo sapiens
CARDKGWPYCSGGSCYSVRWFDPW

SEQ ID NO: 38399 - protein, 23 aa, Homo sapiens
CARDRALELTQKMYYYYYGMDVW

SEQ ID NO: 38400 - protein, 14 aa, Homo sapiens
CARHLPRPYGFDYW

SEQ ID NO: 38401 - protein, 28 aa, Homo sapiens
CAKDRAYYDFWSGYSGANYYYYYGMDVW

SEQ ID NO: 38402 - protein, 17 aa, Homo sapiens
CAALEHDYGDYYYFDYW

SEQ ID NO: 38403 - protein, 19 aa, Homo sapiens
CARDRADYWKTYNYGFDVW

SEQ ID NO: 38404 - protein, 25 aa, Homo sapiens
CAKDLEVLRYFDWLLSDHGYPPDYW

SEQ ID NO: 38405 - protein, 22 aa, Homo sapiens
CARPKRGYSGYVSYYYYGMDVW

SEQ ID NO: 38406 - protein, 18 aa, Homo sapiens
CARDATSSGWPLGAFDIW

SEQ ID NO: 38407 - protein, 22 aa, Homo sapiens
CARRHVGRFLEYYNYYYGMDVW

SEQ ID NO: 38408 - protein, 21 aa, Homo sapiens
CARILTVEDLRDYYYYGMDVW

SEQ ID NO: 38409 - protein, 16 aa, Homo sapiens
CAFEFTSGTEIGFDYW

SEQ ID NO: 38410 - protein, 23 aa, Homo sapiens
CTTTEKLYYYDSSGYPDDAFDIW

SEQ ID NO: 38411 - protein, 15 aa, Homo sapiens
CARESSNLYYYMDVW

SEQ ID NO: 38412 - protein, 16 aa, Homo sapiens
CASLYGDYMTRVLDYW

SEQ ID NO: 38413 - protein, 23 aa, Homo sapiens
CARDVFWEYYDFWSGYPDAFDIW

SEQ ID NO: 38414 - protein, 19 aa, Homo sapiens
CARSNIVVTLSESNWFDPW

SEQ ID NO: 38415 - protein, 25 aa, Homo sapiens
CARDGPPVYYDFWSGSVYYYGMDVW

SEQ ID NO: 38416 - protein, 20 aa, Homo sapiens
CARENYYGSGSYYITMTDYW

SEQ ID NO: 38417 - protein, 18 aa, Homo sapiens
CARHHPGFLEWTNWFDPW

SEQ ID NO: 38418 - protein, 26 aa, Homo sapiens
CARDKKYCSGGSCYSNYYYYYGMDVW

SEQ ID NO: 38419 - protein, 16 aa, Homo sapiens
CATGPAAGTINWFDPW

SEQ ID NO: 38420 - protein, 13 aa, Homo sapiens
CARMRIDGPIDYW

SEQ ID NO: 38421 - protein, 28 aa, Homo sapiens
CAKHYDPIDDLITIMAVVINTRSAFDIW

SEQ ID NO: 38422 - protein, 19 aa, Homo sapiens
CARGDFWSLTYYYYGMDVW

SEQ ID NO: 38423 - protein, 19 aa, Homo sapiens
CARTLAGYSSGWYFWFDPW

SEQ ID NO: 38424 - protein, 16 aa, Homo sapiens
CARPGGYSYGSYFDYW

SEQ ID NO: 38425 - protein, 15 aa, Homo sapiens
CTTDHGSSSWYDGYW

SEQ ID NO: 38426 - protein, 12 aa, Homo sapiens
CAAYRQGGFDYW

SEQ ID NO: 38427 - protein, 20 aa, Homo sapiens
CARDTPYNWNDDYYYGMDVW

SEQ ID NO: 38428 - protein, 18 aa, Homo sapiens
CAAPYCSGGSCRDAFDIW

SEQ ID NO: 38429 - protein, 25 aa, Homo sapiens
CARGYYYDSSGYWGDIYYYYGMDVW

SEQ ID NO: 38430 - protein, 18 aa, Homo sapiens
CARHNVVNTYYYYGMDVW

SEQ ID NO: 38431 - protein, 17 aa, Homo sapiens
CAKDGHRIAAAGSFDYW

SEQ ID NO: 38432 - protein, 22 aa, Homo sapiens
CAREPNSGYDFQGDYYYGMDVW

SEQ ID NO: 38433 - protein, 12 aa, Homo sapiens
CARGPYPRFDPW

SEQ ID NO: 38434 - protein, 17 aa, Homo sapiens
CARDGSGSFFSDPFDYW

SEQ ID NO: 38435 - protein, 14 aa, Homo sapiens
CARGGSTWYYVDYW

SEQ ID NO: 38436 - protein, 25 aa, Homo sapiens
CARPIKARPLNYGSGSYYVDGMDVW

SEQ ID NO: 38437 - protein, 20 aa, Homo sapiens
CARGYNWNDDRAPGAAFSYW

SEQ ID NO: 38438 - protein, 17 aa, Homo sapiens
CALPISASVWGNGFDMW

SEQ ID NO: 38439 - protein, 20 aa, Homo sapiens
CARHRPDSSGWYLWLGFDPW

SEQ ID NO: 38440 - protein, 13 aa, Homo sapiens
CSSGSCYGYFDYW

SEQ ID NO: 38441 - protein, 23 aa, Homo sapiens
CARFEGPYYQDSNYYGAWYFGLW

SEQ ID NO: 38442 - protein, 19 aa, Homo sapiens
CARHWRRWLQTRPGWFDPW

SEQ ID NO: 38443 - protein, 16 aa, Homo sapiens
CAKSRDVVSKGALDVW

SEQ ID NO: 38444 - protein, 18 aa, Homo sapiens
CASDTAMDIYYYYGMDVW

SEQ ID NO: 38445 - protein, 19 aa, Homo sapiens
CARGEGEGLIDYYYGMDVW

SEQ ID NO: 38446 - protein, 25 aa, Homo sapiens
CAKDRNIRGDDILIEPQAPGWLDPW

SEQ ID NO: 38447 - protein, 15 aa, Homo sapiens
CATSYAVVRSTVDYW

SEQ ID NO: 38448 - protein, 28 aa, Homo sapiens
CAKHYDPIDDLITLMVVIISTRSAFDVW

SEQ ID NO: 38449 - protein, 14 aa, Homo sapiens
CAIDSSGYYHPDYW

SEQ ID NO: 38450 - protein, 23 aa, Homo sapiens
CASGPTYDYVWGSYRYGPTGDYW

SEQ ID NO: 38451 - protein, 11 aa, Homo sapiens [sequence omitted]

SEQ ID NO: 38452 - protein, 19 aa, Homo sapiens
CASGPAGTSDYYYYGMDVW

SEQ ID NO: 38453 - protein, 19 aa, Homo sapiens
CARGNYDSSGYYLEPNDYW

SEQ ID NO: 38454 - protein, 14 aa, Homo sapiens
CAKDLSITSCHDYW

SEQ ID NO: 38455 - protein, 15 aa, Homo sapiens
CARVTVTTGLGFDPW

SEQ ID NO: 38456 - protein, 21 aa, Homo sapiens
CARDWGPAVAGTTVEGAFDIW

SEQ ID NO: 38457 - protein, 25 aa, Homo sapiens
CAREFWADYDILTGFETITGGFDIW

SEQ ID NO: 38458 - protein, 24 aa, Homo sapiens
CAKEGRYYDSSGYPGYYYYGMDVW

SEQ ID NO: 38459 - protein, 18 aa, Homo sapiens
CAKAGYSYGYTPNYFDYW

SEQ ID NO: 38460 - protein, 30 aa, Homo sapiens
CARSILILHELLGYYDFWSGHDYYYGMDVW

SEQ ID NO: 38461 - protein, 21 aa, Homo sapiens
CARDLEAYYGSGMPYNWFDPW

SEQ ID NO: 38462 - protein, 21 aa, Homo sapiens
CARHHNSITIFGVAVNWFDPW

SEQ ID NO: 38463 - protein, 15 aa, Homo sapiens
CARWGGSNGYYMDVW

SEQ ID NO: 38464 - protein, 20 aa, Homo sapiens
CARHLRIAAAAVHEAVFDYW

SEQ ID NO: 38465 - protein, 23 aa, Homo sapiens
CARGRNEIGFGELTSCCDWFDPW

SEQ ID NO: 38466 - protein, 15 aa, Homo sapiens
CGVYGGVHSDAIDTW

SEQ ID NO: 38467 - protein, 16 aa, Homo sapiens
CARTYPRDSWRGRDYW

SEQ ID NO: 38468 - protein, 18 aa, Homo sapiens
CARGSGHSYVGRNWFDPW

SEQ ID NO: 38469 - protein, 23 aa, Homo sapiens
CARDSCLGGGDCSNYYYYGMDVW

SEQ ID NO: 38470 - protein, 23 aa, Homo sapiens
CTTTSRADDDYGDYGLDGGYDYW

SEQ ID NO: 38471 - protein, 17 aa, Homo sapiens
CARGGTDGTGPPSGDYW

SEQ ID NO: 38472 - protein, 22 aa, Homo sapiens
CARDIVLMVYAIPYYYYGMDVW

SEQ ID NO: 38473 - protein, 23 aa, Homo sapiens
CARTLYYYDSSGYYVTDYYFDYW

SEQ ID NO: 38474 - protein, 17 aa, Homo sapiens
CARDPGTNMIVPYFDYW

SEQ ID NO: 38475 - protein, 20 aa, Homo sapiens
CARVQGGVLMVYAPGPIDYW

SEQ ID NO: 38476 - protein, 21 aa, Homo sapiens
CARGITMVRGVPVYYYGMDVW

SEQ ID NO: 38477 - protein, 22 aa, Homo sapiens
CARDALDYYDSSGYGPNWFDPW

SEQ ID NO: 38478 - protein, 20 aa, Homo sapiens
CARDRDSITIFGAEWWFDPW

SEQ ID NO: 38479 - protein, 15 aa, Homo sapiens
CARVRFLDFYAFDIW

SEQ ID NO: 38480 - protein, 16 aa, Homo sapiens
CARHDYGSGVGPLDYW

SEQ ID NO: 38481 - protein, 24 aa, Homo sapiens
CARISNFDWLFVAKGYYYYGMDVW

SEQ ID NO: 38482 - protein, 18 aa, Homo sapiens
CAKDRGITIFGVDGMDVW

SEQ ID NO: 38483 - protein, 18 aa, Homo sapiens
CARDRRSIVVVPRCFDLW

SEQ ID NO: 38484 - protein, 20 aa, Homo sapiens
CAKDITYRPYGDYYYGMDVW

SEQ ID NO: 38485 - protein, 17 aa, Homo sapiens
CAKDLYFSGSYGSFDYW

SEQ ID NO: 38486 - protein, 21 aa, Homo sapiens
CARVWVRTFEDLMALYYFDFW

SEQ ID NO: 38487 - protein, 24 aa, Homo sapiens
CARETRDYYDSSGYYYVDPEIDYW

SEQ ID NO: 38488 - protein, 21 aa, Homo sapiens
CTTDTTLWESGYDYAYYFDYW

SEQ ID NO: 38489 - protein, 25 aa, Homo sapiens
CARGAGSPDYNYLTGYYVDWYFDLW

SEQ ID NO: 38490 - protein, 29 aa, Homo sapiens
CAKDGRYYDFWSGYLARQDYYYYYGMDVW

SEQ ID NO: 38491 - protein, 21 aa, Homo sapiens
CARMKRRDGYNYLVGYYFDYW

SEQ ID NO: 38492 - protein, 24 aa, Homo sapiens
CARPYGSGSYSPHGHYYYYGMDVW

SEQ ID NO: 38493 - protein, 21 aa, Homo sapiens
CARELDYSNYSLDYYYGMDVW

SEQ ID NO: 38494 - protein, 17 aa, Homo sapiens
CAREADVDTAMRGFDYW

SEQ ID NO: 38495 - protein, 18 aa, Homo sapiens
CAHRPNDFWSGYYWFDPW

SEQ ID NO: 38496 - protein, 31 aa, Homo sapiens
CALPISAMYYCARERAIFCEGDCYEEDFDIW

SEQ ID NO: 38497 - protein, 19 aa, Homo sapiens
CARDLEQWPTDYYYGMDVW

SEQ ID NO: 38498 - protein, 18 aa, Homo sapiens
CARDRPPGYSYDYGMDVW

SEQ ID NO: 38499 - protein, 21 aa, Homo sapiens
CTTDSVWYYDFWSGYGGSDYW

SEQ ID NO: 38500 - protein, 13 aa, Homo sapiens
CARDRHPSGFDYW

SEQ ID NO: 38501 - protein, 15 aa, Homo sapiens
CARTGGVIVRPIDYW

SEQ ID NO: 38502 - protein, 22 aa, Homo sapiens
CAKGRHRDGYNLWSYYYGMDVW

SEQ ID NO: 38503 - protein, 19 aa, Homo sapiens
CAKGPGSGHPEPKTWFDSW

SEQ ID NO: 38504 - protein, 18 aa, Homo sapiens
CATGPPFGELSKGWFDPW

SEQ ID NO: 38505 - protein, 18 aa, Homo sapiens
CTRDSRVDYGDTYAMDVW

SEQ ID NO: 38506 - protein, 22 aa, Homo sapiens
CTTGLPPYYDFWSGYSWWFDPW

SEQ ID NO: 38507 - protein, 20 aa, Homo sapiens
CARSIVGPTLSYYSYGMDVW

SEQ ID NO: 38508 - protein, 31 aa, Homo sapiens
CAKDGTYYDFWSGYSPRDGHARLVGTNIDYW

SEQ ID NO: 38509 - protein, 27 aa, Homo sapiens
CTTDRWRLELGDDDEDDYYRYYGMDVW

SEQ ID NO: 38510 - protein, 12 aa, Homo sapiens
CARGDKDAFDMW

SEQ ID NO: 38511 - protein, 18 aa, Homo sapiens
CAREKTQQLFQPYYFDYW

SEQ ID NO: 38512 - protein, 20 aa, Homo sapiens
CARDSGITMVRGVINWFDPW

SEQ ID NO: 38513 - protein, 22 aa, Homo sapiens
CASTEYYDSSGYYNYYYGMDVW

SEQ ID NO: 38514 - protein, 19 aa, Homo sapiens
CATGRGYSGYDWFVYFDYW

SEQ ID NO: 38515 - protein, 25 aa, Homo sapiens
CARGGQPFLEWLLSLSYYYYGMDVW

SEQ ID NO: 38516 - protein, 21 aa, Homo sapiens
CARGEIAVVQYYYYYYGMDVW

SEQ ID NO: 38517 - protein, 19 aa, Homo sapiens
CARHWDIVVVPAAIWFDPW

SEQ ID NO: 38518 - protein, 18 aa, Homo sapiens
CARTRFGHYYYYYGMDVW

SEQ ID NO: 38519 - protein, 13 aa, Homo sapiens
CARTCDHGESDYW

SEQ ID NO: 38520 - protein, 13 aa, Homo sapiens
CARGLGQQPFDYW

SEQ ID NO: 38521 - protein, 19 aa, Homo sapiens
CARDGGLNYYDSSGYYDYW

SEQ ID NO: 38522 - protein, 19 aa, Homo sapiens
CARVAHNWNYVVDNWFDPW

SEQ ID NO: 38523 - protein, 16 aa, Homo sapiens
CASEGSSGWPYYFDYW

SEQ ID NO: 38524 - protein, 18 aa, Homo sapiens
CARHPAYYDSSGYHFDYW

SEQ ID NO: 38525 - protein, 15 aa, Homo sapiens
CASGQLAPYEYFQHW

SEQ ID NO: 38526 - protein, 22 aa, Homo sapiens
CARVPQDFTIFGVVIPQYFDYW

SEQ ID NO: 38527 - protein, 17 aa, Homo sapiens
CARDSWSDDYGDYGDYW

SEQ ID NO: 38528 - protein, 31 aa, Homo sapiens
CAVSTPHVYDFWSGYPGGWGVDYYYYGMDVW

SEQ ID NO: 38529 - protein, 18 aa, Homo sapiens
CARDMYSSGRAPSPFDYW

SEQ ID NO: 38530 - protein, 19 aa, Homo sapiens
CATAWGYCSGGSCYRLDYW

SEQ ID NO: 38531 - protein, 23 aa, Homo sapiens
CATGLAVAGNPLNYYYYYGMDVW

SEQ ID NO: 38532 - protein, 18 aa, Homo sapiens
CARHLQQWLVQGPLFDYW

SEQ ID NO: 38533 - protein, 21 aa, Homo sapiens
CARDSLPDSSGYYPLDAFDIW

SEQ ID NO: 38534 - protein, 24 aa, Homo sapiens
CAREKSEGVQLWLSHYYYYGMDVW

SEQ ID NO: 38535 - protein, 16 aa, Homo sapiens
CARDLRRRSIGPSDYW

SEQ ID NO: 38536 - protein, 20 aa, Homo sapiens
CARRYYYDSSGYGVRWFDPW

SEQ ID NO: 38537 - protein, 18 aa, Homo sapiens
CARENDYYDSSGYPPDYW

SEQ ID NO: 38538 - protein, 30 aa, Homo sapiens
CAKDAVYYDFWSGYLKEGGLYYYYYGMDVW

SEQ ID NO: 38539 - protein, 24 aa, Homo sapiens
CARHRRRNVVVVAATPEDGWFDPW

SEQ ID NO: 38540 - protein, 15 aa, Homo sapiens
CAREMVATIGVFDYW

SEQ ID NO: 38541 - protein, 22 aa, Homo sapiens
CAKTIGAYCSGGSCYSGYFDYW

SEQ ID NO: 38542 - protein, 11 aa, Homo sapiens
CQKYNNAPHTF

SEQ ID NO: 38543 - protein, 17 aa, Homo sapiens
CTKPRLSIMNYYALDVW

SEQ ID NO: 38544 - protein, 27 aa, Homo sapiens
CARGEREYVDIVATIYSVYYYYGMDVW

SEQ ID NO: 38545 - protein, 21 aa, Homo sapiens
CTRSHCTNGVCYTGETYFDYW

SEQ ID NO: 38546 - protein, 25 aa, Homo sapiens
CARRGMKHITIFGVVKGDTGWFDPW

SEQ ID NO: 38547 - protein, 11 aa, Homo sapiens
CSYAGRYTNLF

SEQ ID NO: 38548 - protein, 29 aa, Homo sapiens
CATARWGYCSGGSCYTHQIPYYYYGMDVW

SEQ ID NO: 38549 - protein, 23 aa, Homo sapiens
CARELTLRYFDWPLYYYYGMDVW

SEQ ID NO: 38550 - protein, 22 aa, Homo sapiens
CARTTYDILTGYYIGYRAFDIW

SEQ ID NO: 38551 - protein, 21 aa, Homo sapiens
CAKSLVELEPEAFTNYYFDYW

SEQ ID NO: 38552 - protein, 21 aa, Homo sapiens
CAKAWGLWSGYSWLEDYFDYW

SEQ ID NO: 38553 - protein, 18 aa, Homo sapiens
CARHSYTGGISSLDFDYW

SEQ ID NO: 38554 - protein, 23 aa, Homo sapiens
CARDSEDYGDYLGYYYYYGMDVW

SEQ ID NO: 38555 - protein, 25 aa, Homo sapiens
CAREGLGYCSGGSCYSIWVEPFDYW

SEQ ID NO: 38556 - protein, 16 aa, Homo sapiens
CATGWAVAGTSPPDYW

SEQ ID NO: 38557 - protein, 20 aa, Homo sapiens
CARHVVYCSGGSCSYSFDYW

SEQ ID NO: 38558 - protein, 16 aa, Homo sapiens
CVPGVYGDYGYYFDYW

SEQ ID NO: 38559 - protein, 19 aa, Homo sapiens
CATEPALCSSTSCHTFDYW

SEQ ID NO: 38560 - protein, 17 aa, Homo sapiens
CAKLTSSSSGSGYIDYW

SEQ ID NO: 38561 - protein, 30 aa, Homo sapiens
CARDLTYYDFWSGYLPRTTNTYYYYGMDVW

SEQ ID NO: 38562 - protein, 20 aa, Homo sapiens
CAHRGLSEPTVSQRNWFDPW

SEQ ID NO: 38563 - protein, 23 aa, Homo sapiens
CAREGQLYDILTGYYPDGRFDYW

SEQ ID NO: 38564 - protein, 17 aa, Homo sapiens
CARDGGVDTAMGAFDYW

SEQ ID NO: 38565 - protein, 26 aa, Homo sapiens
CATAPPRPHPPFDGYGGNSGNWFDPW

SEQ ID NO: 38566 - protein, 16 aa, Homo sapiens
CAGSYMGSYYYGMDVW

SEQ ID NO: 38567 - protein, 14 aa, Homo sapiens
CARHGTYYYAMDVW

SEQ ID NO: 38568 - protein, 21 aa, Homo sapiens
CAKALELRPHMVRGVIIFDYW

SEQ ID NO: 38569 - protein, 21 aa, Homo sapiens
CARHPGITMIVVVTPYYFDYW

SEQ ID NO: 38570 - protein, 21 aa, Homo sapiens
CARELYYDFWSGSKGSSPDYW

SEQ ID NO: 38571 - protein, 18 aa, Homo sapiens
CARMVRGWLSSYYYMDVW

SEQ ID NO: 38572 - protein, 20 aa, Homo sapiens
CARDGYEGKDYYYYYGMDVW

SEQ ID NO: 38573 - protein, 25 aa, Homo sapiens
CARAPVLRYFDWLPKRNYYYGMDVW

SEQ ID NO: 38574 - protein, 16 aa, Homo sapiens
CATSVAPNHVAWLDPW

SEQ ID NO: 38575 - protein, 27 aa, Homo sapiens
CTRDRWSIEYGDDDDEDYYRYYGMDVW

SEQ ID NO: 38576 - protein, 24 aa, Homo sapiens
CAREWGYYGSGSNTYYYYYGMDVW

SEQ ID NO: 38577 - protein, 17 aa, Homo sapiens
CARGDYGDSALYYFDYW

SEQ ID NO: 38578 - protein, 22 aa, Homo sapiens
CAREVSNWNLWTPYYYYGMDVW

SEQ ID NO: 38579 - protein, 22 aa, Homo sapiens
CVGYYGGNPPSRTADAHYFDYW

SEQ ID NO: 38580 - protein, 25 aa, Homo sapiens
CAKDRLDRDTKQWLGNYYYYGMDVW

SEQ ID NO: 38581 - protein, 17 aa, Homo sapiens
CAKVGRYSYGLNWFDPW

SEQ ID NO: 38582 - protein, 24 aa, Homo sapiens
CARDGVGSSSWPDTEYYYYGMDVW

SEQ ID NO: 38583 - protein, 19 aa, Homo sapiens
CARDLIGGRIAARPDGDYW

SEQ ID NO: 38584 - protein, 18 aa, Homo sapiens
CAKDHVVGYSFLRYFDYW

SEQ ID NO: 38585 - protein, 16 aa, Homo sapiens
CAKSHLSFWSGYYDYW

SEQ ID NO: 38586 - protein, 18 aa, Homo sapiens
CATGPPIRRPGLDWFDPW

SEQ ID NO: 38587 - protein, 16 aa, Homo sapiens
CAKPYSGSYTNWFDPW

SEQ ID NO: 38588 - protein, 22 aa, Homo sapiens
CARDVTYYYDSSGFEEDYFDYW

SEQ ID NO: 38589 - protein, 20 aa, Homo sapiens
CARTYYYGSGSYLMCLFDYW

SEQ ID NO: 38590 - protein, 16 aa, Homo sapiens
CVSFWSGSSTHNFDYW

SEQ ID NO: 38591 - protein, 13 aa, Homo sapiens
CHQYSSNPPMHTF

SEQ ID NO: 38592 - protein, 25 aa, Homo sapiens
CARDPLTIAVAGTSVYYYYYGMDVW

SEQ ID NO: 38593 - protein, 25 aa, Homo sapiens
CARMYYYGSGSYYNPYYYYYGMDVW

SEQ ID NO: 38594 - protein, 22 aa, Homo sapiens
CARDSVTMVRGVILPIYYFDYW

SEQ ID NO: 38595 - protein, 30 aa, Homo sapiens
CAKDLQYYDFWSGYMIGTTRRDYYYGMDVW

SEQ ID NO: 38596 - protein, 20 aa, Homo sapiens
CARELNYYGSGSYPTYFDYW

SEQ ID NO: 38597 - protein, 15 aa, Homo sapiens
CARDDGAVAGNSDYW

SEQ ID NO: 38598 - protein, 17 aa, Homo sapiens
CARGHSSFSFDHHLDYW

SEQ ID NO: 38599 - protein, 20 aa, Homo sapiens
CARDPTVTTNYYYYYGMDVW

SEQ ID NO: 38600 - protein, 16 aa, Homo sapiens
CAHPKRQWLDYYFDYW

SEQ ID NO: 38601 - protein, 25 aa, Homo sapiens
CARQEFSYYYGSGSYSVRENWFDPW

SEQ ID NO: 38602 - protein, 29 aa, Homo sapiens
CARVRDHYDFWSGYFELLASDYYYGMDVW

SEQ ID NO: 38603 - protein, 14 aa, Homo sapiens
CARVRWLRGDFDYW

SEQ ID NO: 38604 - protein, 17 aa, Homo sapiens
CARLPYSSGWFSGFDYW

SEQ ID NO: 38605 - protein, 35 aa, Homo sapiens
CARDPTYYDFWSGYYLTGVGGVRGSDYYYYGMDVW

SEQ ID NO: 38606 - protein, 17 aa, Homo sapiens
CARDLVVVPAHDAFDIW

SEQ ID NO: 38607 - protein, 24 aa, Homo sapiens
CARDLASSLTSVTTVYYYYGMDVW

SEQ ID NO: 38608 - protein, 18 aa, Homo sapiens
CARHKLYGGSTLDAFDIW

SEQ ID NO: 38609 - protein, 21 aa, Homo sapiens
CATGPPYYYDSSGYYYWFDPW

SEQ ID NO: 38610 - protein, 17 aa, Homo sapiens
CARALAAGDYGSPIDYW

SEQ ID NO: 38611 - protein, 23 aa, Homo sapiens
CARHRVSSVTMIVVVKNNWFDPW

SEQ ID NO: 38612 - protein, 17 aa, Homo sapiens
CARDGDYYEISGDFDYW

SEQ ID NO: 38613 - protein, 21 aa, Homo sapiens
CARRAHTDNYDFWRAYSFDYW

SEQ ID NO: 38614 - protein, 15 aa, Homo sapiens
CARRSSAQVVYFDYW

SEQ ID NO: 38615 - protein, 18 aa, Homo sapiens
CARYMVRGVPYAGSFDYW

SEQ ID NO: 38616 - protein, 30 aa, Homo sapiens
CARDPTYYDFWSGYLPSSHEAYYYYGMDVW

SEQ ID NO: 38617 - protein, 19 aa, Homo sapiens
CTTDSYHVYYYPINSFDYW

SEQ ID NO: 38618 - protein, 16 aa, Homo sapiens
CARVGYDSTGRGFDYW

SEQ ID NO: 38619 - protein, 19 aa, Homo sapiens
CARVRGRGFFLYYYGMDVW

SEQ ID NO: 38620 - protein, 17 aa, Homo sapiens
CASGSGSYWIEYYFDYW

SEQ ID NO: 38621 - protein, 16 aa, Homo sapiens
CAHRHVSPNGGAFDIW

SEQ ID NO: 38622 - protein, 19 aa, Homo sapiens
CARHFSRWLQLQSSEWDYW

SEQ ID NO: 38623 - protein, 22 aa, Homo sapiens
CARGEDIVVVVAALNIYHFDYW

SEQ ID NO: 38624 - protein, 24 aa, Homo sapiens
CARARRTYYYDSSGYYYGETFDYW

SEQ ID NO: 38625 - protein, 12 aa, Homo sapiens
CQQSYSILTWTF

SEQ ID NO: 38626 - protein, 19 aa, Homo sapiens
CTRDQDDYGEYVGSVFDTW

SEQ ID NO: 38627 - protein, 21 aa, Homo sapiens
CASREISGWSVSYYYYGMDVW

SEQ ID NO: 38628 - protein, 12 aa, Homo sapiens
CACLGLTTLDYW

SEQ ID NO: 38629 - protein, 22 aa, Homo sapiens
CARNLCSTDNGFVSCYNVFDIW

SEQ ID NO: 38630 - protein, 18 aa, Homo sapiens
CATAAPGPYNWNYELDYW

SEQ ID NO: 38631 - protein, 15 aa, Homo sapiens
CQSADSISSYPRVVF

SEQ ID NO: 38632 - protein, 14 aa, Homo sapiens
CAKDAGDYGSFDYW

SEQ ID NO: 38633 - protein, 15 aa, Homo sapiens
CARGHSVDSWYFDLW

SEQ ID NO: 38634 - protein, 29 aa, Homo sapiens
CASGVIPTHYDFWSGLVGSSVYYYGMDVW

SEQ ID NO: 38635 - protein, 28 aa, Homo sapiens
CAKDEYYYDSSGYYWPPDYYYYYGMDVW

SEQ ID NO: 38636 - protein, 23 aa, Homo sapiens
CARDGMSLVSTEIDYYYYGMDVW

SEQ ID NO: 38637 - protein, 20 aa, Homo sapiens
CARHVPGTLPSGWYFYFDYW

SEQ ID NO: 38638 - protein, 20 aa, Homo sapiens
CARGWDGYYYDSSDWGFDYW

SEQ ID NO: 38639 - protein, 16 aa, Homo sapiens
CAKEMDNYYYYGMDVW

SEQ ID NO: 38640 - protein, 13 aa, Homo sapiens [sequence omitted]

SEQ ID NO: 38641 - protein, 21 aa, Homo sapiens
CARDGIAAATYYYYYYGMDVW

SEQ ID NO: 38642 - protein, 20 aa, Homo sapiens
CARDLRFEERGDYVPGFDYW

SEQ ID NO: 38643 - protein, 17 aa, Homo sapiens
CARQRGDYFDSYTYDYW

SEQ ID NO: 38644 - protein, 19 aa, Homo sapiens
CARAYDFWSGYENHQFDYW

SEQ ID NO: 38645 - protein, 20 aa, Homo sapiens
CAHVPYYYDRSGRDDAFDIW

SEQ ID NO: 38646 - protein, 16 aa, Homo sapiens
CARLGSRYGSDAFDIW

SEQ ID NO: 38647 - protein, 17 aa, Homo sapiens
CAKGGSPTVTTSAFDYW

SEQ ID NO: 38648 - protein, 13 aa, Homo sapiens
CARDAAMDEPDYW

SEQ ID NO: 38649 - protein, 18 aa, Homo sapiens
CANPRGYSYGYRGDFDYW

SEQ ID NO: 38650 - protein, 18 aa, Homo sapiens
CARPQIGSGWSNDAFDIW

SEQ ID NO: 38651 - protein, 25 aa, Homo sapiens
CATAPPIGYCSGGSCSQVVGWFDPW

SEQ ID NO: 38652 - protein, 19 aa, Homo sapiens
CARVDNDFWSGPQGLFDYW

SEQ ID NO: 38653 - protein, 21 aa, Homo sapiens
CASGSYCNGATCNYDIQFDYW

SEQ ID NO: 38654 - protein, 16 aa, Homo sapiens
CARDRMWIQIEELDYW

SEQ ID NO: 38655 - protein, 22 aa, Homo sapiens
CARDRGYYDSSGYYYVGWFDPW

SEQ ID NO: 38656 - protein, 17 aa, Homo sapiens
CAKDYYYDILTGYFDYW

SEQ ID NO: 38657 - protein, 20 aa, Homo sapiens
CARASPYYDFWSGYSYFDYW

SEQ ID NO: 38658 - protein, 17 aa, Homo sapiens
CARLVWELLPNWYFDLW

SEQ ID NO: 38659 - protein, 24 aa, Homo sapiens
CARSRVDHYDFWSGYYINNWFDPW

SEQ ID NO: 38660 - protein, 18 aa, Homo sapiens
CAREYRSGGQNHQAFDYW

SEQ ID NO: 38661 - protein, 16 aa, Homo sapiens
CARHRTVEYYNVFDSW

SEQ ID NO: 38662 - protein, 21 aa, Homo sapiens
CAKGPLTPRANSYYYYHMDVW

SEQ ID NO: 38663 - protein, 17 aa, Homo sapiens
CATLLANWNDVGAFDIW

SEQ ID NO: 38664 - protein, 19 aa, Homo sapiens
CARDLIAVADRLYGLLDYW

SEQ ID NO: 38665 - protein, 27 aa, Homo sapiens
CAKDLKYYDFWSGLGSDYYYYYGMDVW

SEQ ID NO: 38666 - protein, 16 aa, Homo sapiens
CVRSSLRGSPYYFASW

SEQ ID NO: 38667 - protein, 17 aa, Homo sapiens
CASGFLEWLQTSPLDYW

SEQ ID NO: 38668 - protein, 20 aa, Homo sapiens
CARHLGDWNDPYYYYGMDVW

SEQ ID NO: 38669 - protein, 27 aa, Homo sapiens
CARDPPLYYYDSSGYYFGYYYYGMDVW

SEQ ID NO: 38670 - protein, 27 aa, Homo sapiens
CARERIVVVPAAMWGSPHYYYYGMDVW

SEQ ID NO: 38671 - protein, 19 aa, Homo sapiens
CARNSNGYDSRVIDAFDIW

SEQ ID NO: 38672 - protein, 21 aa, Homo sapiens
CAKDQRFAGSEGRSSNYFDYW

SEQ ID NO: 38673 - protein, 20 aa, Homo sapiens
CARDRSEVVAATQYNWFDPW

SEQ ID NO: 38674 - protein, 27 aa, Homo sapiens
CARANLEYYDFWSGYLPGYYYYGMDVW

SEQ ID NO: 38675 - protein, 23 aa, Homo sapiens
CARGDLGYCSSTSCYEIRVPDYW

SEQ ID NO: 38676 - protein, 27 aa, Homo sapiens
CARAEQVPGDFWSGYYRDYYYYGMDVW

SEQ ID NO: 38677 - protein, 17 aa, Homo sapiens
CARDGAVAGQDDAFDIW

SEQ ID NO: 38678 - protein, 17 aa, Homo sapiens
CARDGIVVVTSGWFDPW

SEQ ID NO: 38679 - protein, 31 aa, Homo sapiens
CARDQEYYDFWSGYLSMETHRRYYYYGMDVW

SEQ ID NO: 38680 - protein, 22 aa, Homo sapiens
CAKGSAPYCSGGSCYPLGVDYW

SEQ ID NO: 38681 - protein, 22 aa, Homo sapiens
CAASIAAAGTPFLIYYYGMDVW

SEQ ID NO: 38682 - protein, 17 aa, Homo sapiens
CATEFAIVVPIEYFQHW

SEQ ID NO: 38683 - protein, 15 aa, Homo sapiens
CARRRPGGWYVFDYW

SEQ ID NO: 38684 - protein, 18 aa, Homo sapiens
CASAYSSSWFYYYGMDVW

SEQ ID NO: 38685 - protein, 18 aa, Homo sapiens
CAKNLWFGELLNWYFDLW

SEQ ID NO: 38686 - protein, 18 aa, Homo sapiens
CARGGSSIAALDWYFDLW

SEQ ID NO: 38687 - protein, 11 aa, Homo sapiens
CQAWDSETVIF

SEQ ID NO: 38688 - protein, 16 aa, Homo sapiens
CARDWSSFDSDAFDIW

SEQ ID NO: 38689 - protein, 23 aa, Homo sapiens
CARDQRATLRRGVIIGSFYLDFW

SEQ ID NO: 38690 - protein, 16 aa, Homo sapiens
CAKVEHLFLSGWFDYW

SEQ ID NO: 38691 - protein, 22 aa, Homo sapiens
CAIQYYIAAAGTRYYYYGMDVW

SEQ ID NO: 38692 - protein, 24 aa, Homo sapiens
CARGPPPSYYYDSSGYYFSYFDYW

SEQ ID NO: 38693 - protein, 18 aa, Homo sapiens
CAKDPHYDFWSGYYFDYW

SEQ ID NO: 38694 - protein, 16 aa, Homo sapiens
CAKGVWGSYYGYFDYW

SEQ ID NO: 38695 - protein, 15 aa, Homo sapiens
CAREGDYGDSRLDYW

SEQ ID NO: 38696 - protein, 22 aa, Homo sapiens
CARGAGVGLGFLEGLPYYFDSW

SEQ ID NO: 38697 - protein, 20 aa, Homo sapiens
CAHRRNYYPGSGFGWFFDFW

SEQ ID NO: 38698 - protein, 14 aa, Homo sapiens
CARDRRGGDQADYW

SEQ ID NO: 38699 - protein, 24 aa, Homo sapiens
CARDSQMYYYDSSGYYYVNAFDIW

SEQ ID NO: 38700 - protein, 17 aa, Homo sapiens
CATSTAVGYSLFWFDPW

SEQ ID NO: 38701 - protein, 21 aa, Homo sapiens
CARHPKEITIFGVVKDWFDPW

SEQ ID NO: 38702 - protein, 13 aa, Homo sapiens
CTTDPQTLTLDYW

SEQ ID NO: 38703 - protein, 17 aa, Homo sapiens
CARACGSYYDPPNFDYW

SEQ ID NO: 38704 - protein, 18 aa, Homo sapiens
CARGVTIFGVVTQPFDPW

SEQ ID NO: 38705 - protein, 21 aa, Homo sapiens
CARLEPPIAASSFRGGWFDPW

SEQ ID NO: 38706 - protein, 32 aa, Homo sapiens
CASSEGGTVKYYDFWSGYYTPAEGYYYGMDVW

SEQ ID NO: 38707 - protein, 30 aa, Homo sapiens
CAKDLEYYDFWSGYYPQTGRQYYYYGMDVW

SEQ ID NO: 38708 - protein, 20 aa, Homo sapiens
CARDGFVVATTTEDYYFDYW

SEQ ID NO: 38709 - protein, 22 aa, Homo sapiens
CAKEPPTNYYYGSGSHNYFDYW

SEQ ID NO: 38710 - protein, 18 aa, Homo sapiens
CARDAWNTNYYYYGMDVW

SEQ ID NO: 38711 - protein, 24 aa, Homo sapiens
CARDGTRSVDVWGSYRRDSSVDYW

SEQ ID NO: 38712 - protein, 19 aa, Homo sapiens
CARASWGSGSYYDYYFDYW

SEQ ID NO: 38713 - protein, 25 aa, Homo sapiens
CARVGYNDYYDSSGYYYNYWYFDLW

SEQ ID NO: 38714 - protein, 22 aa, Homo sapiens
CARAHRNPYDSSGYYVDAFDIW

SEQ ID NO: 38715 - protein, 28 aa, Homo sapiens
CARHESRAANLILCSGGSCYYYYGMDVW

SEQ ID NO: 38716 - protein, 21 aa, Homo sapiens
CARDPQEARGYPRNHNWFDPW

SEQ ID NO: 38717 - protein, 13 aa, Homo sapiens
CARVTPVVAADYW

SEQ ID NO: 38718 - protein, 25 aa, Homo sapiens
CARLGYSSGWYPTARPYYYYGMDVW

SEQ ID NO: 38719 - protein, 13 aa, Homo sapiens [sequence omitted]

SEQ ID NO: 38720 - protein, 20 aa, Homo sapiens
CARVFIPFWSGYYQISDDYW

SEQ ID NO: 38721 - protein, 17 aa, Homo sapiens
CATIETTTITQWYIDFW

SEQ ID NO: 38722 - protein, 20 aa, Homo sapiens
CAHIPLDITIQITSNWFDPW

SEQ ID NO: 38723 - protein, 18 aa, Homo sapiens
CARAGTDGDYGTDAFDIW

SEQ ID NO: 38724 - protein, 16 aa, Homo sapiens
CAKDPFPLLEWSLDYW

SEQ ID NO: 38725 - protein, 20 aa, Homo sapiens
CATGPPYYDILTRENWFDPW

SEQ ID NO: 38726 - protein, 18 aa, Homo sapiens
CAKDTTGPLAAAGPLDYW

SEQ ID NO: 38727 - protein, 23 aa, Homo sapiens
CAKGPHTRDTIFGVVIEYYFDYW

SEQ ID NO: 38728 - protein, 25 aa, Homo sapiens
CARAGYCSGGSCYSGSYYYYGMDVW

SEQ ID NO: 38729 - protein, 21 aa, Homo sapiens
CAHSPQVYYGSGSYYIWFDPW

SEQ ID NO: 38730 - protein, 17 aa, Homo sapiens
CLGRQSSSWYWEAFDIW

SEQ ID NO: 38731 - protein, 17 aa, Homo sapiens
CATGPTAPGTGRWFDPW

SEQ ID NO: 38732 - protein, 20 aa, Homo sapiens
CARDLDYDFWSGYFDAFDIW

SEQ ID NO: 38733 - protein, 24 aa, Homo sapiens
CAHTVQPWLLSLPNYYYYYGMDVW

SEQ ID NO: 38734 - protein, 23 aa, Homo sapiens
CARSKVPSDFWSGYVYYYGMDVW

SEQ ID NO: 38735 - protein, 19 aa, Homo sapiens
CARVYYYGSGYIYYGMDVW

SEQ ID NO: 38736 - protein, 29 aa, Homo sapiens
CAKDLKYYDILTGYFPVSSYYYYYGMDVW

SEQ ID NO: 38737 - protein, 21 aa, Homo sapiens
CARTSPYYYDSSGYPIPIDYW

SEQ ID NO: 38738 - protein, 24 aa, Homo sapiens
CAKNLFRGYSIVDTVYYYYGMDVW

SEQ ID NO: 38739 - protein, 25 aa, Homo sapiens
CARAAYYDSSGYYPDGGTNYYFDYW

SEQ ID NO: 38740 - protein, 13 aa, Homo sapiens
CAGGGLIAYFDYW

SEQ ID NO: 38741 - protein, 22 aa, Homo sapiens
CARDSDCSSTSCYEGYNWFDPW

SEQ ID NO: 38742 - protein, 25 aa, Homo sapiens
CAREIRYFDWLLIGQDFLLGWFDPW

SEQ ID NO: 38743 - protein, 12 aa, Homo sapiens
CQECYSTPPLTF

SEQ ID NO: 38744 - protein, 20 aa, Homo sapiens
CARDYNEYYNYVPERYFDFW

SEQ ID NO: 38745 - protein, 17 aa, Homo sapiens
CARDSGYSYDNNWFDPW

SEQ ID NO: 38746 - protein, 19 aa, Homo sapiens
CARQAAGTKYYYYYGMDVW

SEQ ID NO: 38747 - protein, 25 aa, Homo sapiens
CARVGWVRGVITPESQELYNWFDPW

SEQ ID NO: 38748 - protein, 24 aa, Homo sapiens
CATGPLTYYYDSSGYYHGGWFDPW

SEQ ID NO: 38749 - protein, 18 aa, Homo sapiens
CARDMFVATMGLHPFDPW

SEQ ID NO: 38750 - protein, 18 aa, Homo sapiens
CAKDRDDILTGYPYFDYW

SEQ ID NO: 38751 - protein, 17 aa, Homo sapiens
CTRVDERALVPDWFDPW

SEQ ID NO: 38752 - protein, 15 aa, Homo sapiens
CARVGFDYASVFDYW

SEQ ID NO: 38753 - protein, 21 aa, Homo sapiens
CTRGPYCGSGTCYVLGSFDPW

SEQ ID NO: 38754 - protein, 22 aa, Homo sapiens
CAKVNYYDSSGYYFHDPTFDYW

SEQ ID NO: 38755 - protein, 17 aa, Homo sapiens
CAREQSSGWLYDAFDIW

SEQ ID NO: 38756 - protein, 26 aa, Homo sapiens
CARETPEVFFLGWSERYYTYNGMDVW

SEQ ID NO: 38757 - protein, 21 aa, Homo sapiens
CARGPEYYDFWSGYGYGFDYW

SEQ ID NO: 38758 - protein, 28 aa, Homo sapiens
CARGPGDYDFWSGYFFGGGMTPETVDYW

SEQ ID NO: 38759 - protein, 21 aa, Homo sapiens
CTRVIHYSSPRGDYYYGMDVW

SEQ ID NO: 38760 - protein, 25 aa, Homo sapiens
CAKVQGKPTTVVAATFHYYYGMDVW

SEQ ID NO: 38761 - protein, 20 aa, Homo sapiens
CVKDERITIFGVVIMGGDYW

SEQ ID NO: 38762 - protein, 26 aa, Homo sapiens
CATAFAVVPVERGMDLYYYYYGMDVW

SEQ ID NO: 38763 - protein, 17 aa, Homo sapiens
CATDRPFGVVIYAFDIW

SEQ ID NO: 38764 - protein, 20 aa, Homo sapiens
CAKVVAGSNYYYYYYGMDVW

SEQ ID NO: 38765 - protein, 28 aa, Homo sapiens
CAREAESGIAVWMVLGAGPGNEYYFDYW

SEQ ID NO: 38766 - protein, 19 aa, Homo sapiens
CARDPRRWLQHLNGYFDLW

SEQ ID NO: 38767 - protein, 22 aa, Homo sapiens
CAAQVKITIFGVVITSDAFDIW

SEQ ID NO: 38768 - protein, 20 aa, Homo sapiens
CARLGLEAVRQYYYYGMDVW

SEQ ID NO: 38769 - protein, 21 aa, Homo sapiens
CASTTLLGYCSSTSCPPGDYW

SEQ ID NO: 38770 - protein, 19 aa, Homo sapiens
CARGPHFDSSGSQHMLDYW

SEQ ID NO: 38771 - protein, 22 aa, Homo sapiens
CARHMGWVGGGTVGGPAGSDYW

SEQ ID NO: 38772 - protein, 19 aa, Homo sapiens
CAKLAAAGHLGPSYYFDYW

SEQ ID NO: 38773 - protein, 20 aa, Homo sapiens
CAKDKLVLLWFGDRGYFDYW

SEQ ID NO: 38774 - protein, 13 aa, Homo sapiens
CARNSAGNWFDPW

SEQ ID NO: 38775 - protein, 11 aa, Homo sapiens
CQQSYNTLFSF

SEQ ID NO: 38776 - protein, 24 aa, Homo sapiens
CARGDITIFGVVISSSGYTPFGYW

SEQ ID NO: 38777 - protein, 24 aa, Homo sapiens
CAREPLKSLLWFGRDYYYYGMDVW

SEQ ID NO: 38778 - protein, 30 aa, Homo sapiens
CAKDPTYYDFWSGYLKVSPYYYYYYGMDVW

SEQ ID NO: 38779 - protein, 20 aa, Homo sapiens
CARILVDCSGGSCYLPFDYW

SEQ ID NO: 38780 - protein, 22 aa, Homo sapiens
CARQDELRFFGRIKSAGWFDPW

SEQ ID NO: 38781 - protein, 19 aa, Homo sapiens
CARVNYDILTGYYIPGDYW

SEQ ID NO: 38782 - protein, 13 aa, Homo sapiens
CARATPVTSLDYW

SEQ ID NO: 38783 - protein, 14 aa, Homo sapiens [sequence omitted]

SEQ ID NO: 38784 - protein, 16 aa, Homo sapiens
CARMVSSWYGFLPDYW

SEQ ID NO: 38785 - protein, 14 aa, Homo sapiens
CAKMGAAGKVPDYW

SEQ ID NO: 38786 - protein, 20 aa, Homo sapiens
CARDTSSSWFHYYYYGMDVW

SEQ ID NO: 38787 - protein, 25 aa, Homo sapiens
CRSGGIQLELRVEGTYYYYYGMDVW

SEQ ID NO: 38788 - protein, 22 aa, Homo sapiens
CAKSPVVIVPTFSQYANWFDPW

SEQ ID NO: 38789 - protein, 34 aa, Homo sapiens
CAKDHPRQFSSYYDILTGYYHPSNYYYYYGMDVW

SEQ ID NO: 38790 - protein, 19 aa, Homo sapiens
CARDLMKDRARPGNWFDPW

SEQ ID NO: 38791 - protein, 22 aa, Homo sapiens
CAKQPLITIFGVVTAEYYFDYW

SEQ ID NO: 38792 - protein, 18 aa, Homo sapiens
CARTVVNQRDYYYGMDVW

SEQ ID NO: 38793 - protein, 19 aa, Homo sapiens
CAGGQSEGTYYYYYGMDVW

SEQ ID NO: 38794 - protein, 25 aa, Homo sapiens
CAKAMGDGYCSGGSCLEYYYGMDVW

SEQ ID NO: 38795 - protein, 29 aa, Homo sapiens
CAKDLFYYDILTGYAAVDQNYYYYGMDVW

SEQ ID NO: 38796 - protein, 22 aa, Homo sapiens
CARDAVGYCSDDPCYLHAMDVW

SEQ ID NO: 38797 - protein, 29 aa, Homo sapiens
CAKDVLTGGYDFWSGYYIPEYYYYGMDVW

SEQ ID NO: 38798 - protein, 16 aa, Homo sapiens
CASTYSSWPPSWFDYW

SEQ ID NO: 38799 - protein, 30 aa, Homo sapiens
CAKDSAYYDFWSGYGRDRAYYYYYYGMDVW

SEQ ID NO: 38800 - protein, 17 aa, Homo sapiens
CARGERYTGVPNAFDIW

SEQ ID NO: 38801 - protein, 17 aa, Homo sapiens
CARDMSDPHYYYGMDVW

SEQ ID NO: 38802 - protein, 23 aa, Homo sapiens
CARVLWFGELSFPGYYYYGMDVW

SEQ ID NO: 38803 - protein, 29 aa, Homo sapiens
CARDFLYYDFWSGYLASGYYYYYYGMDVW

SEQ ID NO: 38804 - protein, 16 aa, Homo sapiens
CAILRFSITGGRFDPW

SEQ ID NO: 38805 - protein, 27 aa, Homo sapiens
CASAEPDFAYRIFGPYSPGRHSAFDYW

SEQ ID NO: 38806 - protein, 16 aa, Homo sapiens
CARINYDSSGYYYDYW

SEQ ID NO: 38807 - protein, 18 aa, Homo sapiens
CASGGFLEWLLSGWFDPW

SEQ ID NO: 38808 - protein, 17 aa, Homo sapiens
CVRPSPLTTSIAVLDYW

SEQ ID NO: 38809 - protein, 22 aa, Homo sapiens
CASGYDSSGYYFDYYYYGMDVW

SEQ ID NO: 38810 - protein, 29 aa, Homo sapiens
CAKDSFLRENSSWYEILNAYYYYYGMDVW

SEQ ID NO: 38811 - protein, 12 aa, Homo sapiens
CAKSGSGSYDYW

SEQ ID NO: 38812 - protein, 10 aa, Homo sapiens
CYSYAGSYRF

SEQ ID NO: 38813 - protein, 20 aa, Homo sapiens
CVRGRPLVLYNNSWTYFDSW

SEQ ID NO: 38814 - protein, 18 aa, Homo sapiens
CAKSLGDTAMVTDAFDIW

SEQ ID NO: 38815 - protein, 17 aa, Homo sapiens
CATTNILTDMGYYFDYW

SEQ ID NO: 38816 - protein, 13 aa, Homo sapiens [sequence omitted]

SEQ ID NO: 38817 - protein, 17 aa, Homo sapiens
CARQSLIAVAGTGWDYW

SEQ ID NO: 38818 - protein, 10 aa, Homo sapiens
CQQRSSWWSF

SEQ ID NO: 38819 - protein, 23 aa, Homo sapiens
CASGPIAAAGSSSWDYYYGMDVW

SEQ ID NO: 38820 - protein, 22 aa, Homo sapiens
CARIHHSSGWPNPYYYYGMDVW

SEQ ID NO: 38821 - protein, 16 aa, Homo sapiens
CATGSVAGRVSWFDPW

SEQ ID NO: 38822 - protein, 21 aa, Homo sapiens
CAKDGFYSSGWYGGNNWFDPW

SEQ ID NO: 38823 - protein, 30 aa, Homo sapiens
CAKERTYYDFWSGYLRSPSTPYYYYGMDVW

SEQ ID NO: 38824 - protein, 16 aa, Homo sapiens
CARRNKDGSTRFFDCW

SEQ ID NO: 38825 - protein, 15 aa, Homo sapiens
CARHKASIADAFDIW

SEQ ID NO: 38826 - protein, 16 aa, Homo sapiens
CARSKLLSYLSDFDYW

SEQ ID NO: 38827 - protein, 27 aa, Homo sapiens
CAKDFKYYDILTGLYLMVNYYYGMDVW

SEQ ID NO: 38828 - protein, 24 aa, Homo sapiens
CASNFYMTSFGGLLKYYYYGMHVW

SEQ ID NO: 38829 - protein, 23 aa, Homo sapiens
CTRDTALRYFDWLSYYYYGMDVW

SEQ ID NO: 38830 - protein, 18 aa, Homo sapiens
CARHDQIAAPANNWFDPW

SEQ ID NO: 38831 - protein, 21 aa, Homo sapiens
CARDDSLIAAAGWGERRFDPW

SEQ ID NO: 38832 - protein, 16 aa, Homo sapiens
CARYVISSAGHKCDYW

SEQ ID NO: 38833 - protein, 17 aa, Homo sapiens
CAKVPYSSGLEGYFDYW

SEQ ID NO: 38834 - protein, 19 aa, Homo sapiens
CARGGYSSSSHYYYGMDVW

SEQ ID NO: 38835 - protein, 19 aa, Homo sapiens
CATEPAWSMVRGATHFDYW

SEQ ID NO: 38836 - protein, 19 aa, Homo sapiens
CARAPPSDFWSGYYTFDYW

SEQ ID NO: 38837 - protein, 23 aa, Homo sapiens
CAREQKVVVAAPGYYYYYGMDVW

SEQ ID NO: 38838 - protein, 24 aa, Homo sapiens
CARDLLISRVTATPNYYYYGMDVW

SEQ ID NO: 38839 - protein, 30 aa, Homo sapiens
CAKDRSYYDFWSGYLPRALSDYYYYGMDVW

SEQ ID NO: 38840 - protein, 15 aa, Homo sapiens
CARFDWNYAGISDYW

SEQ ID NO: 38841 - protein, 24 aa, Homo sapiens
CAKDLNDFWSGYYTGSGDYYFDYW

SEQ ID NO: 38842 - protein, 27 aa, Homo sapiens
CATSDYYYYDSSGYLGTNYYYYGMDVW

SEQ ID NO: 38843 - protein, 42 aa, Homo sapiens
CPSLHLSIFLLSATIRCFSLFSYMFCSSPRIIHFVKDLWYLF

SEQ ID NO: 38844 - protein, 20 aa, Homo sapiens
CAKDEYHYESSGYTVYFDSW

SEQ ID NO: 38845 - protein, 21 aa, Homo sapiens
CARHTLAYSSGWSTNRLFDYW

SEQ ID NO: 38846 - protein, 22 aa, Homo sapiens
CAARKGGLWFGELYRGVYFDYW

SEQ ID NO: 38847 - protein, 21 aa, Homo sapiens
CARENDYSSLGDYYYYGMDVW

SEQ ID NO: 38848 - protein, 17 aa, Homo sapiens
CAKDDVGVVPYGWFDPW

SEQ ID NO: 38849 - protein, 16 aa, Homo sapiens
CARDGEQQLINAFDIW

SEQ ID NO: 38850 - protein, 13 aa, Homo sapiens
CARDDDYGFFDFW

SEQ ID NO: 38851 - protein, 21 aa, Homo sapiens
CASNRGYYDSSGYYHWYFDLW

SEQ ID NO: 38852 - protein, 19 aa, Homo sapiens
CAGYTYSYGFRHYYAMDVW

SEQ ID NO: 38853 - protein, 18 aa, Homo sapiens
CARAHPYSYGRLYYFDYW

SEQ ID NO: 38854 - protein, 16 aa, Homo sapiens
CANHQTVGIEDAFDIW

SEQ ID NO: 38855 - protein, 11 aa, Homo sapiens [sequence omitted]

SEQ ID NO: 38856 - protein, 31 aa, Homo sapiens
CARDLMYYDILTGYLIDSGTRSYYYYGMDVW

SEQ ID NO: 38857 - protein, 24 aa, Homo sapiens
CARWSANYYDRSEYYYKNRAFDFW

SEQ ID NO: 38858 - protein, 18 aa, Homo sapiens
CARHGDSSGWSPPYFDYW

SEQ ID NO: 38859 - protein, 23 aa, Homo sapiens
CARSPVLRYFDWLLDPVSWFDPW

SEQ ID NO: 38860 - protein, 7 aa, Homo sapiens
CANIDYW

SEQ ID NO: 38861 - protein, 22 aa, Homo sapiens
CASDSDDYSNYMDYYYYGMDVW

SEQ ID NO: 38862 - protein, 18 aa, Homo sapiens
CARDSPLVDGDYSGVDYW

SEQ ID NO: 38863 - protein, 14 aa, Homo sapiens
CTGIVVVTAAIDYW

SEQ ID NO: 38864 - protein, 24 aa, Homo sapiens
CAKDGDLIPTYCGGDCSFYYFDYW

SEQ ID NO: 38865 - protein, 13 aa, Homo sapiens
CQQSYGTPPMYTF

SEQ ID NO: 38866 - protein, 20 aa, Homo sapiens
CARAVSGRLSSGSHFWFDPW

SEQ ID NO: 38867 - protein, 16 aa, Homo sapiens
CATDFAVTTDRAFFYW

SEQ ID NO: 38868 - protein, 16 aa, Homo sapiens
CARAPHYYDSRDFDYW

SEQ ID NO: 38869 - protein, 11 aa, Homo sapiens [sequence omitted]

SEQ ID NO: 38870 - protein, 12 aa, Homo sapiens
CQQYDSFSSRAF

SEQ ID NO: 38871 - protein, 18 aa, Homo sapiens
CTTDDYGDYDIYWYFDLW

SEQ ID NO: 38872 - protein, 27 aa, Homo sapiens
CAKVVEPSWVVRGVIGFGYYYYGMDVW

SEQ ID NO: 38873 - protein, 22 aa, Homo sapiens
CAKDYDYGSGSYYILLGAFDIW

SEQ ID NO: 38874 - protein, 14 aa, Homo sapiens
CAKGHYGPYYFDYW

SEQ ID NO: 38875 - protein, 13 aa, Homo sapiens
CARICLGSYYDYW

SEQ ID NO: 38876 - protein, 22 aa, Homo sapiens
CARDFTVTNGPPLGYYYGMDVW

SEQ ID NO: 38877 - protein, 13 aa, Homo sapiens
CAVDVMSTTFDSW

SEQ ID NO: 38878 - protein, 30 aa, Homo sapiens
CARDLSSTVNSLNYDILTGYRLPNWYFDLW

SEQ ID NO: 38879 - protein, 15 aa, Homo sapiens
CARTHGGKGPGEDYW

SEQ ID NO: 38880 - protein, 24 aa, Homo sapiens
CARDGESVGSWLSPYYYYYGMDVW

SEQ ID NO: 38881 - protein, 20 aa, Homo sapiens
CAKESASSLDYYYYYGMDVW

SEQ ID NO: 38882 - protein, 14 aa, Homo sapiens
CAKALNSYYYFDYW

SEQ ID NO: 38883 - protein, 15 aa, Homo sapiens
CAKAIFGWLEYFDYW

SEQ ID NO: 38884 - protein, 21 aa, Homo sapiens
CARDWFPYYYDSSGQGAFDIW

SEQ ID NO: 38885 - protein, 23 aa, Homo sapiens
CAKSVSYSSGWYEPYYYYGMDVW

SEQ ID NO: 38886 - protein, 28 aa, Homo sapiens
CTRDMYYDFWSGYYLDSPYYYYYGMDVW

SEQ ID NO: 38887 - protein, 22 aa, Homo sapiens
CAREWSNSSGWSRITRRGLDYW

SEQ ID NO: 38888 - protein, 19 aa, Homo sapiens
CSRDPEIAAAVPLIFFDYW

SEQ ID NO: 38889 - protein, 22 aa, Homo sapiens
CARFGMTMVGGVEVYGDWFDAW

SEQ ID NO: 38890 - protein, 17 aa, Homo sapiens
CVRAGRPTPGTGWLDPW

SEQ ID NO: 38891 - protein, 16 aa, Homo sapiens
CARPRGGSYYAPFDYW

SEQ ID NO: 38892 - protein, 21 aa, Homo sapiens
CARQGITIFGVVIPDYYFDYW

SEQ ID NO: 38893 - protein, 17 aa, Homo sapiens
CTVSLCSSDYCLSFDQW

SEQ ID NO: 38894 - protein, 22 aa, Homo sapiens
CAILGGWVGYCSSTSCREFDYW

SEQ ID NO: 38895 - protein, 20 aa, Homo sapiens
CAKDLPMVRGVHYYYGMDVW

SEQ ID NO: 38896 - protein, 24 aa, Homo sapiens
CASVSSPISLGTAAAYYYYGMDVW

SEQ ID NO: 38897 - protein, 20 aa, Homo sapiens
CARKQYFSDRRGYSEAFDVW

SEQ ID NO: 38898 - protein, 18 aa, Homo sapiens
CARDQGDSGSYYNHFDYW

SEQ ID NO: 38899 - protein, 30 aa, Homo sapiens
CAKDLLYYDILTGYSPIRDHYYYYYGMDVW

SEQ ID NO: 38900 - protein, 19 aa, Homo sapiens
CASRYGRNYYYYYYGMDVW

SEQ ID NO: 38901 - protein, 24 aa, Homo sapiens
CAHSRLGAVRFYYYDSSGSTFDYW

SEQ ID NO: 38902 - protein, 15 aa, Homo sapiens
CATPASGNARDVDYW

SEQ ID NO: 38903 - protein, 16 aa, Homo sapiens
CATAAVLMVGHWFDPW

SEQ ID NO: 38904 - protein, 17 aa, Homo sapiens
CARGCYYGSGTCRYDYW

SEQ ID NO: 38905 - protein, 29 aa, Homo sapiens
CARDGGLGTTVTTLLGPFYTTTDYYFDYW

SEQ ID NO: 38906 - protein, 24 aa, Homo sapiens
CARERRSYDILTGYNYYYYGMDVW

SEQ ID NO: 38907 - protein, 28 aa, Homo sapiens
CARDSLDAPEYNWNDRFKYYYYYGMDVW

SEQ ID NO: 38908 - protein, 16 aa, Homo sapiens
CVRVGSGHSYGQFDPW

SEQ ID NO: 38909 - protein, 21 aa, Homo sapiens
CTRGANSRNPAAAGGVDFDIW

SEQ ID NO: 38910 - protein, 25 aa, Homo sapiens
CAIESPTFYYDILTGYSRNYYFDYW

SEQ ID NO: 38911 - protein, 13 aa, Homo sapiens
CAGRFLGTAFDIW

SEQ ID NO: 38912 - protein, 23 aa, Homo sapiens
CAREQPLSYGSGSYYLSLPFDYW

SEQ ID NO: 38913 - protein, 26 aa, Homo sapiens
CARAHLDELMITFGGVIVTHWYFDLW

SEQ ID NO: 38914 - protein, 14 aa, Homo sapiens
CARVLLPFNWFDPW

SEQ ID NO: 38915 - protein, 16 aa, Homo sapiens
CARRPSSSWVNWFDPW

SEQ ID NO: 38916 - protein, 18 aa, Homo sapiens
CARVVLTIFGVVTHFDYW

SEQ ID NO: 38917 - protein, 16 aa, Homo sapiens
CARSALYDSSGYYSYW

SEQ ID NO: 38918 - protein, 15 aa, Homo sapiens
CTTDKRSYSNDFDYW

SEQ ID NO: 38919 - protein, 23 aa, Homo sapiens
CAKTRFDGGGFHPYYYYYGMDVW

SEQ ID NO: 38920 - protein, 18 aa, Homo sapiens
CAKDHPGYGDYEPYFDYW

SEQ ID NO: 38921 - protein, 18 aa, Homo sapiens
CARGATVTRTGTYYFDQW

SEQ ID NO: 38922 - protein, 25 aa, Homo sapiens
CAKYYARLAYITIFGVVPKPYFDYW

SEQ ID NO: 38923 - protein, 21 aa, Homo sapiens
CARDSLDDYGDGSLVDAFDIW

SEQ ID NO: 38924 - protein, 23 aa, Homo sapiens
CAHAGQGGTIFGVVIISGYFDYW

SEQ ID NO: 38925 - protein, 16 aa, Homo sapiens
CANSLQHYYYYGMDVW

SEQ ID NO: 38926 - protein, 19 aa, Homo sapiens
CARHDPGYSSSWYSVWDYW

SEQ ID NO: 38927 - protein, 30 aa, Homo sapiens
CAKDRTYYDFWSGYLGGGPNYYYYYGMDVW

SEQ ID NO: 38928 - protein, 16 aa, Homo sapiens
CAKCQGGSCYDLFDYW

SEQ ID NO: 38929 - protein, 18 aa, Homo sapiens
CARHGRFGSSWYHYFDYW

SEQ ID NO: 38930 - protein, 14 aa, Homo sapiens
CARDRLGKDGMDVW

SEQ ID NO: 38931 - protein, 24 aa, Homo sapiens
CARGGRTYYDFWSGYCRECWFDPW

SEQ ID NO: 38932 - protein, 33 aa, Homo sapiens
CARGPNYYDSSGYPPTSSKRAGLYYYYYGMDVW

SEQ ID NO: 38933 - protein, 22 aa, Homo sapiens
CARDQAQYSSSWYGPAFSFDYW

SEQ ID NO: 38934 - protein, 17 aa, Homo sapiens
CARDYDILTGPSGPDYW

SEQ ID NO: 38935 - protein, 11 aa, Homo sapiens
CAKASGTFDVW

SEQ ID NO: 38936 - protein, 20 aa, Homo sapiens
CATGPGIAVAGRAWRWFDPW

SEQ ID NO: 38937 - protein, 21 aa, Homo sapiens
CAHRLSELLWFGELGFAFDIW

SEQ ID NO: 38938 - protein, 16 aa, Homo sapiens
CVRRATYYQTNYFDSW

SEQ ID NO: 38939 - protein, 18 aa, Homo sapiens
CATGAAAVVFRESWFDPW

SEQ ID NO: 38940 - protein, 13 aa, Homo sapiens
CTTSVTYESFEYW

SEQ ID NO: 38941 - protein, 16 aa, Homo sapiens
CAKGGGGSCYSASDYW

SEQ ID NO: 38942 - protein, 19 aa, Homo sapiens
CAKDVHSVLQLWLGGFDPW

SEQ ID NO: 38943 - protein, 16 aa, Homo sapiens
CATGRPMTTVDWFDPW

SEQ ID NO: 38944 - protein, 23 aa, Homo sapiens
CATAPAAGSYLGHYYYYYGMDVW

SEQ ID NO: 38945 - protein, 18 aa, Homo sapiens
CTSSTVTTYYYYYAMDAW

SEQ ID NO: 38946 - protein, 23 aa, Homo sapiens
CAKGVDAEMIVVVAYYYYGMDVW

SEQ ID NO: 38947 - protein, 21 aa, Homo sapiens
CARHGRTLFLQIMDLLHFDSW

SEQ ID NO: 38948 - protein, 16 aa, Homo sapiens
CATGWAWLVPTNFDYW

SEQ ID NO: 38949 - protein, 25 aa, Homo sapiens
CARESVTIFGVVTETTLTGPKFDYW

SEQ ID NO: 38950 - protein, 20 aa, Homo sapiens
CAREVGGDDRGDYGRCFDYW

SEQ ID NO: 38951 - protein, 17 aa, Homo sapiens
CALVTAIFSVGDAFDIW

SEQ ID NO: 38952 - protein, 17 aa, Homo sapiens
CAATTPYSSSWIWFDPW

SEQ ID NO: 38953 - protein, 23 aa, Homo sapiens
CASPGGSPYQLLKTYYYYGMDVW

SEQ ID NO: 38954 - protein, 18 aa, Homo sapiens
CARDRDDFWSGYSGVDYW

SEQ ID NO: 38955 - protein, 31 aa, Homo sapiens
CAKDATYYDFWSGYLGRSVEDDHYYYGMDVW

SEQ ID NO: 38956 - protein, 21 aa, Homo sapiens
CAKVMSFDWLLGYYYYGMDVW

SEQ ID NO: 38957 - protein, 20 aa, Homo sapiens
CATVGPPLGYSSSWYWFDPW

SEQ ID NO: 38958 - protein, 21 aa, Homo sapiens
CAKVGYYDSSGQLPPASFDPW

SEQ ID NO: 38959 - protein, 16 aa, Homo sapiens
CASGIQLSTWYYFDYW

SEQ ID NO: 38960 - protein, 19 aa, Homo sapiens
CARDFHGTIAVAGTRFDYW

SEQ ID NO: 38961 - protein, 13 aa, Homo sapiens
CAKGPYYDHFDYW

SEQ ID NO: 38962 - protein, 20 aa, Homo sapiens
CATRYETKWELLTLDAFDIW

SEQ ID NO: 38963 - protein, 17 aa, Homo sapiens
CVRDRALVGRGYYFDYW

SEQ ID NO: 38964 - protein, 19 aa, Homo sapiens
CAKTVYSYGYSDDMIFDYW

SEQ ID NO: 38965 - protein, 23 aa, Homo sapiens
CARDPHEDDFWSGKYYYYGMDVW

SEQ ID NO: 38966 - protein, 20 aa, Homo sapiens
CARPYGDYIPEGVEGWFDPW

SEQ ID NO: 38967 - protein, 22 aa, Homo sapiens
CARRMSVSISNARSSGGWIDPW

SEQ ID NO: 38968 - protein, 14 aa, Homo sapiens
CAADGGDLDAPNVW

SEQ ID NO: 38969 - protein, 13 aa, Homo sapiens
CVKKGLPPNFDYW

SEQ ID NO: 38970 - protein, 26 aa, Homo sapiens
CARVGYYDFWSGYSPLLYYYYGMDVW

SEQ ID NO: 38971 - protein, 15 aa, Homo sapiens
CARHQAPPLVAADYW

SEQ ID NO: 38972 - protein, 29 aa, Homo sapiens
CAKDTKYYDFWSGYLESPLVYYYYGMDVW

SEQ ID NO: 38973 - protein, 33 aa, Homo sapiens
CSLKASDTAMYYCARLEPPIAASSFRGGWFDPW

SEQ ID NO: 38974 - protein, 13 aa, Homo sapiens
CARMQQQLALDYW

SEQ ID NO: 38975 - protein, 23 aa, Homo sapiens
CARDGYRPDILTGYCRLCYFDYW

SEQ ID NO: 38976 - protein, 19 aa, Homo sapiens
CAHRRRGFLWFGELSFDYW

SEQ ID NO: 38977 - protein, 23 aa, Homo sapiens
CARVPPTDYGDYAFRYYYGMDVW

SEQ ID NO: 38978 - protein, 23 aa, Homo sapiens
CAREDFRPTETQYYYNYYGMDVW

SEQ ID NO: 38979 - protein, 23 aa, Homo sapiens
CAREELDYGDFLRGADPCHFDYW

SEQ ID NO: 38980 - protein, 16 aa, Homo sapiens
CARESYSYGSLPFDYW

SEQ ID NO: 38981 - protein, 15 aa, Homo sapiens
CSGGSCRMYNWFDPW

SEQ ID NO: 38982 - protein, 14 aa, Homo sapiens
CSSRDSSGDLNWVF

SEQ ID NO: 38983 - protein, 15 aa, Homo sapiens
CARAYDILTGYYDYW

SEQ ID NO: 38984 - protein, 28 aa, Homo sapiens
CARVPGTTQFDGPLFFSLSATEYYFDYW

SEQ ID NO: 38985 - protein, 14 aa, Homo sapiens
CAKHIGRGAYFDYW

SEQ ID NO: 38986 - protein, 11 aa, Homo sapiens
CQTYDSNTWVF

SEQ ID NO: 38987 - protein, 23 aa, Homo sapiens
CAKDLVLGYSSGWYYYYYGMDVW

SEQ ID NO: 38988 - protein, 16 aa, Homo sapiens
CASGGFTAMPYPFDYW

SEQ ID NO: 38989 - protein, 20 aa, Homo sapiens
CATFTAMVTGGYLYYGMDVW

SEQ ID NO: 38990 - protein, 20 aa, Homo sapiens
CATVPAFVVVTANLYYFDYW

SEQ ID NO: 38991 - protein, 13 aa, Homo sapiens
CHVWDSSTKHVIF

SEQ ID NO: 38992 - protein, 21 aa, Homo sapiens
CARDQIVAGEFVDYYYGMDVW

SEQ ID NO: 38993 - protein, 18 aa, Homo sapiens
CARDSRRCPGNKVCLDYW

SEQ ID NO: 38994 - protein, 18 aa, Homo sapiens
CAKPHFLYGDYVNWFDPW

SEQ ID NO: 38995 - protein, 21 aa, Homo sapiens
CAKIQIRVVIFTETYDSFDIW

SEQ ID NO: 38996 - protein, 21 aa, Homo sapiens
CARAHSRITIFGVVIRWFDPW

SEQ ID NO: 38997 - protein, 17 aa, Homo sapiens
CQQYGSAPLHTSPLYTF

SEQ ID NO: 38998 - protein, 22 aa, Homo sapiens
CARESRWLQFPYYYYYYGMDVW

SEQ ID NO: 38999 - protein, 18 aa, Homo sapiens
CAKCITGTLILGYYFDYW

SEQ ID NO: 39000 - protein, 18 aa, Homo sapiens
CARVHGGYYLRPNWFDPW

SEQ ID NO: 39001 - protein, 29 aa, Homo sapiens
CAKDLRYYDFWSGYSGGEYYYYYYGMDVW

SEQ ID NO: 39002 - protein, 22 aa, Homo sapiens
CARYVRSSSWSWTYYYYGMDVW

SEQ ID NO: 39003 - protein, 23 aa, Homo sapiens
CARDSTPLYCSGGSCYPKGFDYW

SEQ ID NO: 39004 - protein, 23 aa, Homo sapiens
CTSQYDFWSGYSHRYYYYGMDVW

SEQ ID NO: 39005 - protein, 21 aa, Homo sapiens
CATGPPIVVVPAGKSVWFDPW

SEQ ID NO: 39006 - protein, 29 aa, Homo sapiens
CATALVVSSSWPLTVLGHESYYYYGMDVW

SEQ ID NO: 39007 - protein, 23 aa, Homo sapiens
CARVLGRCSNGVCHWDYNRFDPW

SEQ ID NO: 39008 - protein, 30 aa, Homo sapiens
CAKDLAYYDFWSGYLTPSRKPGYYYGMDVW

SEQ ID NO: 39009 - protein, 19 aa, Homo sapiens
CASGANCGGDCNVYYFDYW

SEQ ID NO: 39010 - protein, 17 aa, Homo sapiens
CARDPSITMIDYYFDYW

SEQ ID NO: 39011 - protein, 26 aa, Homo sapiens
CAQIPPLRYFDWLLESDSPSYYFDYW

SEQ ID NO: 39012 - protein, 20 aa, Homo sapiens
CARHPVYCTNGVCSNYFDYW

SEQ ID NO: 39013 - protein, 19 aa, Homo sapiens
CATPPGGNISSSWYYFDYW

SEQ ID NO: 39014 - protein, 23 aa, Homo sapiens
CARDLGVGSGWPLYYYYYGMDVW

SEQ ID NO: 39015 - protein, 22 aa, Homo sapiens
CARLCGLLCRKTTYYYYGMDVW

SEQ ID NO: 39016 - protein, 22 aa, Homo sapiens
CARHTHYRITMIVVAPGAFDIW

SEQ ID NO: 39017 - protein, 20 aa, Homo sapiens
CARGTLIGAADYYYYGMDVW

SEQ ID NO: 39018 - protein, 16 aa, Homo sapiens
CARPEIVAAGFGFDYW

SEQ ID NO: 39019 - protein, 13 aa, Homo sapiens
CQQFNNYPHGPGF

SEQ ID NO: 39020 - protein, 14 aa, Homo sapiens
CAKEFAHATPFDYW

SEQ ID NO: 39021 - protein, 17 aa, Homo sapiens
CATEPITFGGVIPPDYW

SEQ ID NO: 39022 - protein, 23 aa, Homo sapiens
CARSQGGPQVLRFTYYYYGMDVW

SEQ ID NO: 39023 - protein, 13 aa, Homo sapiens
CAQHISYPPTWTF

SEQ ID NO: 39024 - protein, 16 aa, Homo sapiens
CATSSSVVAATWFDPW

SEQ ID NO: 39025 - protein, 32 aa, Homo sapiens
CAKDFHSNYDFWSGYPGAVWGDIYYYYGMDVW

SEQ ID NO: 39026 - protein, 22 aa, Homo sapiens
CARVNSDTIFGVVIIPGWFDPW

SEQ ID NO: 39027 - protein, 19 aa, Homo sapiens
CARRLGGSFSFYINYFDPW

SEQ ID NO: 39028 - protein, 23 aa, Homo sapiens
CAKVDCSSTSCYYYYYYYGMDVW

SEQ ID NO: 39029 - protein, 14 aa, Homo sapiens
CARYSKLLVGFDYW

SEQ ID NO: 39030 - protein, 29 aa, Homo sapiens
CARDNKYYDILTGYFPPRDYYYYYGMDVW

SEQ ID NO: 39031 - protein, 23 aa, Homo sapiens
CAREGAVDYSNYRGPYYYGMDVW

SEQ ID NO: 39032 - protein, 15 aa, Homo sapiens
CAGGYYDTSGYVDYW

SEQ ID NO: 39033 - protein, 25 aa, Homo sapiens
CARDRIGVIATSGVRDYYYYGMDVW

SEQ ID NO: 39034 - protein, 25 aa, Homo sapiens
CARLGYCSGGSCRPNAYYYYGMDVW

SEQ ID NO: 39035 - protein, 18 aa, Homo sapiens
CARALTIFGVVGSWFDPW

SEQ ID NO: 39036 - protein, 27 aa, Homo sapiens
CARGGPYSTIFGVVKSGEEGDDAFDIW

SEQ ID NO: 39037 - protein, 22 aa, Homo sapiens
CARGGGYSYGRTNYYYYGMDVW

SEQ ID NO: 39038 - protein, 30 aa, Homo sapiens
CARDPQYYDILTGYSPANYPRAPRKYFDLW

SEQ ID NO: 39039 - protein, 22 aa, Homo sapiens
CARGAESYDFWSGYYGAYFDYW

SEQ ID NO: 39040 - protein, 17 aa, Homo sapiens
CARLRTMITFGGVPDYW

SEQ ID NO: 39041 - protein, 32 aa, Homo sapiens
CAKDREYYDFWSGYFGGAGGTTLYYYYGMDVW

SEQ ID NO: 39042 - protein, 11 aa, Homo sapiens
CVMWELIFDYW

SEQ ID NO: 39043 - protein, 17 aa, Homo sapiens
CATAYAFYGSGSYLGYW

SEQ ID NO: 39044 - protein, 20 aa, Homo sapiens
CARSFTPPMTTVVTGYFDYW

SEQ ID NO: 39045 - protein, 20 aa, Homo sapiens
CAKARIAVAGTTIHPHFDYW

SEQ ID NO: 39046 - protein, 15 aa, Homo sapiens
CARDPPNSGYCLDYW

SEQ ID NO: 39047 - protein, 16 aa, Homo sapiens
CATLHSWQHLVRGDYW

SEQ ID NO: 39048 - protein, 18 aa, Homo sapiens
CARGRGHSFGPDPYFDYW

SEQ ID NO: 39049 - protein, 17 aa, Homo sapiens
CVRGTPNWLDLQYFDSW

SEQ ID NO: 39050 - protein, 25 aa, Homo sapiens
CARGSLSINMMVVVFIGGSFYLDSW

SEQ ID NO: 39051 - protein, 16 aa, Homo sapiens
CATASAVAGTGWFDPW

SEQ ID NO: 39052 - protein, 16 aa, Homo sapiens
CARDRAGGYSYTFDYW

SEQ ID NO: 39053 - protein, 17 aa, Homo sapiens
CARASSQIFGVVGPDYW

SEQ ID NO: 39054 - protein, 15 aa, Homo sapiens
CASGGGYYMTHFDYW

SEQ ID NO: 39055 - protein, 20 aa, Homo sapiens
CARGALDDYSDDNRDAFDIW

SEQ ID NO: 39056 - protein, 21 aa, Homo sapiens
CAKDSRIFASPLYYYYGMDVW

SEQ ID NO: 39057 - protein, 15 aa, Homo sapiens
CARDIRYSSGWTDYW

SEQ ID NO: 39058 - protein, 27 aa, Homo sapiens
CARGGDVSEFIAYCGGDCYSHRTVDYW

SEQ ID NO: 39059 - protein, 22 aa, Homo sapiens
CARGGSYYDTTTGSHTDFFDFW

SEQ ID NO: 39060 - protein, 20 aa, Homo sapiens
CARDLVEYSSSSWVGNFDYW

SEQ ID NO: 39061 - protein, 16 aa, Homo sapiens
CATGPTVTTRGWFDPW

SEQ ID NO: 39062 - protein, 26 aa, Homo sapiens
CARDRHYYDSSGYYYAPYYYYGMDVW

SEQ ID NO: 39063 - protein, 11 aa, Homo sapiens
CQQYRHYSRTF

SEQ ID NO: 39064 - protein, 15 aa, Homo sapiens
CASQSVDTAMVSDYW

SEQ ID NO: 39065 - protein, 16 aa, Homo sapiens
CARGTYDYDDWGFDYW

SEQ ID NO: 39066 - protein, 14 aa, Homo sapiens
CARHVWELNPFDYW

SEQ ID NO: 39067 - protein, 19 aa, Homo sapiens
CASHDFWNHDYYYYGMDVW

SEQ ID NO: 39068 - protein, 11 aa, Homo sapiens [sequence omitted]

SEQ ID NO: 39069 - protein, 17 aa, Homo sapiens
CARHLLGSILPYYFDYW

SEQ ID NO: 39070 - protein, 25 aa, Homo sapiens
CAKDPHEEGVITIFGVVIIVAFDIW

SEQ ID NO: 39071 - protein, 19 aa, Homo sapiens
CAQGDGYRPFGVGYELDYW

SEQ ID NO: 39072 - protein, 22 aa, Homo sapiens
CASSTWIQLRVSLYYYYGMDVW

SEQ ID NO: 39073 - protein, 26 aa, Homo sapiens
CARGHYDYVWGSYRSGPSGYWYFDLW

SEQ ID NO: 39074 - protein, 29 aa, Homo sapiens
CAKDIPVQGRVPAAMWSIGHYYYYGMDVW

SEQ ID NO: 39075 - protein, 19 aa, Homo sapiens
CARGRHGDYVWGGALFDPW

SEQ ID NO: 39076 - protein, 18 aa, Homo sapiens
CARAAPHHFSSSAGIDYW

SEQ ID NO: 39077 - protein, 24 aa, Homo sapiens
CARHGTESKWELLWGGATHWFDPW

SEQ ID NO: 39078 - protein, 18 aa, Homo sapiens
CAKGIQLWPYYYYGMDVW

SEQ ID NO: 39079 - protein, 17 aa, Homo sapiens
CAKDGDLVGWLQSFDYW

SEQ ID NO: 39080 - protein, 21 aa, Homo sapiens
CARAGWDRVVYYYYYYGMDVW

SEQ ID NO: 39081 - protein, 17 aa, Homo sapiens
CTTEGGYSGYDSSFDYW

SEQ ID NO: 39082 - protein, 19 aa, Homo sapiens
CAREHHEQYSYGADTFDYW

SEQ ID NO: 39083 - protein, 21 aa, Homo sapiens
CARGPLTYYDILTGYYLFDYW

SEQ ID NO: 39084 - protein, 15 aa, Homo sapiens
CVRSRSSWYAYFDYW

SEQ ID NO: 39085 - protein, 16 aa, Homo sapiens
CARSISGSYLGAIDYW

SEQ ID NO: 39086 - protein, 20 aa, Homo sapiens
CASRRGIAVAGYYYYGMDVW

SEQ ID NO: 39087 - protein, 21 aa, Homo sapiens
CARHPYILRFGVVMRTYFDYW

SEQ ID NO: 39088 - protein, 20 aa, Homo sapiens
CAGSTSRGLLVYYYYGMDVW

SEQ ID NO: 39089 - protein, 23 aa, Homo sapiens
CARVFPPYSSGWYPGSYMRFDPW

SEQ ID NO: 39090 - protein, 24 aa, Homo sapiens
CARGSKKSIMITFGARPPSSFDYW

SEQ ID NO: 39091 - protein, 14 aa, Homo sapiens
CSRVAAGTNYFDFW

SEQ ID NO: 39092 - protein, 19 aa, Homo sapiens
CARHRRAIFGVVIMDVDYW

SEQ ID NO: 39093 - protein, 19 aa, Homo sapiens
CARGGDLVFYYYYYGMDVW

SEQ ID NO: 39094 - protein, 21 aa, Homo sapiens
CARDRAKSWFGEFYYYGMDVW

SEQ ID NO: 39095 - protein, 20 aa, Homo sapiens
CARYIPTYYYDSSGYYYDYW

SEQ ID NO: 39096 - protein, 18 aa, Homo sapiens
CATVYVWGSYRYTPLDYW

SEQ ID NO: 39097 - protein, 16 aa, Homo sapiens
CVRAAYEFKNGWFDFW

SEQ ID NO: 39098 - protein, 15 aa, Homo sapiens
CARDLPIFGDRYDYW

SEQ ID NO: 39099 - protein, 12 aa, Homo sapiens
CARHAGASFDHW

SEQ ID NO: 39100 - protein, 23 aa, Homo sapiens
CARDRRKSIAVAGTYYYYGMDVW

SEQ ID NO: 39101 - protein, 24 aa, Homo sapiens
CARDTRRDYYDSSGYPAADAFDIW

SEQ ID NO: 39102 - protein, 21 aa, Homo sapiens
CVKDPGLLWFGELLYRWFDPW

SEQ ID NO: 39103 - protein, 16 aa, Homo sapiens
CAKGVQTTGSSYFDSW

SEQ ID NO: 39104 - protein, 21 aa, Homo sapiens
CARRGLGYCSGGSCYSGFDYW

SEQ ID NO: 39105 - protein, 15 aa, Homo sapiens
CARPSSGWKGAFDYW

SEQ ID NO: 39106 - protein, 14 aa, Homo sapiens
CARMSVGGRGFDYW

SEQ ID NO: 39107 - protein, 14 aa, Homo sapiens
CAAWDDSLGGSFVF

SEQ ID NO: 39108 - protein, 18 aa, Homo sapiens
CASTYYDYVWGQYYFDYW

SEQ ID NO: 39109 - protein, 27 aa, Homo sapiens
CARPVPSERFLEWLSLHAYYYYGMDVW

SEQ ID NO: 39110 - protein, 22 aa, Homo sapiens
CARFCVYSAPAAARPVYYFDYW

SEQ ID NO: 39111 - protein, 30 aa, Homo sapiens
CAKDQKYYDILTGYYPNEGGYYYYYGMDVW

SEQ ID NO: 39112 - protein, 15 aa, Homo sapiens
CARDRYNGSWYFDSW

SEQ ID NO: 39113 - protein, 16 aa, Homo sapiens
CATSPGVIVGGWFDPW

SEQ ID NO: 39114 - protein, 15 aa, Homo sapiens
CATDTSGYYPYFEFW

SEQ ID NO: 39115 - protein, 23 aa, Homo sapiens
CARDVSYDYVWGSYRTSGWFDPW

SEQ ID NO: 39116 - protein, 28 aa, Homo sapiens
CARGYYYYDSSGYYPTRDYYYYYGMDVW

SEQ ID NO: 39117 - protein, 22 aa, Homo sapiens
CTTDHPYSSSSFYYYYYGMDVW

SEQ ID NO: 39118 - protein, 22 aa, Homo sapiens
CARHAEYSYGAGASGVTWFDPW

SEQ ID NO: 39119 - protein, 21 aa, Homo sapiens
CARKAAGYDFWSGHTYYFDYW

SEQ ID NO: 39120 - protein, 14 aa, Homo sapiens
CARDRSGYSCFDYW

SEQ ID NO: 39121 - protein, 18 aa, Homo sapiens
CTRPIMIGYYYYYGMDVW

SEQ ID NO: 39122 - protein, 16 aa, Homo sapiens
CARAPTPYYGSGIDYW

SEQ ID NO: 39123 - protein, 27 aa, Homo sapiens
CGRDGASYYDFWRGYPDRHYYYGMDVW

SEQ ID NO: 39124 - protein, 15 aa, Homo sapiens
CAHKTVPSFTYFDYW

SEQ ID NO: 39125 - protein, 23 aa, Homo sapiens
CARDIKEYNWNPSYYYYYGMDVW

SEQ ID NO: 39126 - protein, 21 aa, Homo sapiens
CTRVLLAYNSVWFRDWYFDLW

SEQ ID NO: 39127 - protein, 16 aa, Homo sapiens
CAGIAARGGFPQSDYW

SEQ ID NO: 39128 - protein, 16 aa, Homo sapiens
CAKDDYYGSGSYFDYW

SEQ ID NO: 39129 - protein, 21 aa, Homo sapiens
CARWVLYCSSTSCYNNWFDPW

SEQ ID NO: 39130 - protein, 19 aa, Homo sapiens
CASQRRYTAKDYDRWFDPW

SEQ ID NO: 39131 - protein, 17 aa, Homo sapiens
CATSSLIRIQHWNFDLW

SEQ ID NO: 39132 - protein, 24 aa, Homo sapiens
CARGDYDFWSGYHRHYYYYGMDVW

SEQ ID NO: 39133 - protein, 17 aa, Homo sapiens
CASVYAHGSYYYGMDVW

SEQ ID NO: 39134 - protein, 22 aa, Homo sapiens
CARDLGHYYGSGSYYTYGMDVW

SEQ ID NO: 39135 - protein, 19 aa, Homo sapiens
CARDRGTIFGVVIIPYDYW

SEQ ID NO: 39136 - protein, 16 aa, Homo sapiens
CAKGEASDYVDYFDYW

SEQ ID NO: 39137 - protein, 23 aa, Homo sapiens
CARILYYYDSSGYPGFPPYFDYW

SEQ ID NO: 39138 - protein, 20 aa, Homo sapiens
CARDLRDSSGYYYEEAFDIW

SEQ ID NO: 39139 - protein, 16 aa, Homo sapiens
CARGHAYSSSWGIDYW

SEQ ID NO: 39140 - protein, 25 aa, Homo sapiens
CARQSIGYCSSTSCYFDYYYGMDVW

SEQ ID NO: 39141 - protein, 24 aa, Homo sapiens
CARHRADPFTAIFGVVNPYYFDYW

SEQ ID NO: 39142 - protein, 23 aa, Homo sapiens
CARLRVYYDYVWGSYRLNWFDPW

SEQ ID NO: 39143 - protein, 23 aa, Homo sapiens
CARGRESSGWYIGHYYYYGMDVW

SEQ ID NO: 39144 - protein, 14 aa, Homo sapiens
CATDHFGEGGFDIW

SEQ ID NO: 39145 - protein, 19 aa, Homo sapiens
CATLPRYCSGGSCYYPDYW

SEQ ID NO: 39146 - protein, 22 aa, Homo sapiens
CARGRPATSFFRGSIQYAMDVW

SEQ ID NO: 39147 - protein, 23 aa, Homo sapiens
CARDARNYDSSGYYYVEPYFDYW

SEQ ID NO: 39148 - protein, 22 aa, Homo sapiens
CARHVTMIVVVITTDPYYFDYW

SEQ ID NO: 39149 - protein, 16 aa, Homo sapiens
CATAPPVGATNWFDPW

SEQ ID NO: 39150 - protein, 13 aa, Homo sapiens
CAKNQQTNWFDPW

SEQ ID NO: 39151 - protein, 24 aa, Homo sapiens
CAKSSINRYYYDSSGYTGDYFDYW

SEQ ID NO: 39152 - protein, 25 aa, Homo sapiens
CARDDVVVPAELGISTYYYYGMDVW

SEQ ID NO: 39153 - protein, 29 aa, Homo sapiens
CAKDGKYYDILTGYLAPPKYYYYYGMDVW

SEQ ID NO: 39154 - protein, 23 aa, Homo sapiens
CATGIAYFAFYPHDSSGYSFDYW

SEQ ID NO: 39155 - protein, 24 aa, Homo sapiens
CARDPPFFRFSSGWYPHEPHFDYW

SEQ ID NO: 39156 - protein, 20 aa, Homo sapiens
CATGANDNHFWGGPSSTDYW

SEQ ID NO: 39157 - protein, 24 aa, Homo sapiens
CARDLWDYYGSGKGPGYYYGMDVW

SEQ ID NO: 39158 - protein, 31 aa, Homo sapiens
CALPISAVYYCATDLRYRISRQHYNSYIDYW

SEQ ID NO: 39159 - protein, 25 aa, Homo sapiens
CAKDRSLPHITMIVVAIRLGAFDIW

SEQ ID NO: 39160 - protein, 12 aa, Homo sapiens
CLLYEGGAHWEF

SEQ ID NO: 39161 - protein, 22 aa, Homo sapiens
CASLGIAAAGTRFYYYYGMDVW

SEQ ID NO: 39162 - protein, 20 aa, Homo sapiens
CARPYGSGSYWVYYYGMDVW

SEQ ID NO: 39163 - protein, 22 aa, Homo sapiens
CARSDTYNWNDSRYYYYGMDVW

SEQ ID NO: 39164 - protein, 18 aa, Homo sapiens
CATSPSITMIVAHWFDPW

SEQ ID NO: 39165 - protein, 23 aa, Homo sapiens
CARIRTNHYYDSSGYYLDAFDIW

SEQ ID NO: 39166 - protein, 21 aa, Homo sapiens
CAHSSQNYSSGLTDSRPFDIW

SEQ ID NO: 39167 - protein, 28 aa, Homo sapiens
CAKERLRCSGGSCYPGKYYYYYYGMDVW

SEQ ID NO: 39168 - protein, 21 aa, Homo sapiens
CARDTLRYWITMVRGVILDYW

SEQ ID NO: 39169 - protein, 18 aa, Homo sapiens
CARDIKQWLVFNWYFDLW

SEQ ID NO: 39170 - protein, 26 aa, Homo sapiens
CARVGSGDYYYDSSGYYYVYHAFDIW

SEQ ID NO: 39171 - protein, 22 aa, Homo sapiens
CAHHTGGADTPVLTDHNWFDPW

SEQ ID NO: 39172 - protein, 20 aa, Homo sapiens
CARERFGVVISGYYYGMDVW

SEQ ID NO: 39173 - protein, 16 aa, Homo sapiens
CAKDKSSGWYGIFDYW

SEQ ID NO: 39174 - protein, 18 aa, Homo sapiens
CARVRFYVVVADIWFDPW

SEQ ID NO: 39175 - protein, 22 aa, Homo sapiens
CTTESKLRYFDWIYYYYGMDVW

SEQ ID NO: 39176 - protein, 27 aa, Homo sapiens
CARINCSGGSCRGAFAGYYYYYGMDVW

SEQ ID NO: 39177 - protein, 20 aa, Homo sapiens
CARDYRYCTNGVCLYYFDYW

SEQ ID NO: 39178 - protein, 17 aa, Homo sapiens
CTTEDLLWFGESPLDYW

SEQ ID NO: 39179 - protein, 18 aa, Homo sapiens
CARHGYGIVVVNDAFDIW

SEQ ID NO: 39180 - protein, 22 aa, Homo sapiens
CARVVRHYDSSGYYLPGVIDYW

SEQ ID NO: 39181 - protein, 11 aa, Homo sapiens
CQSAVSSGWIF

SEQ ID NO: 39182 - protein, 26 aa, Homo sapiens
CAKGVAVLRFLEWLSVNYYYYGMDVW

SEQ ID NO: 39183 - protein, 19 aa, Homo sapiens
CAVLSGAYFQRSDDVFDLW

SEQ ID NO: 39184 - protein, 21 aa, Homo sapiens
CARGGDDFWSGYYTFGWFDPW

SEQ ID NO: 39185 - protein, 16 aa, Homo sapiens
CARVIGQYRYYGMDVW

SEQ ID NO: 39186 - protein, 26 aa, Homo sapiens
CARHQSSSDYYDSSGYWKASSWFDPW

SEQ ID NO: 39187 - protein, 23 aa, Homo sapiens
CASTPFVGTILTGYYNVHYFDYW

SEQ ID NO: 39188 - protein, 20 aa, Homo sapiens
CASPPRDSSGWYGAYYFDYW

SEQ ID NO: 39189 - protein, 20 aa, Homo sapiens
CASNGGSSPEIYYYYGMDVW

SEQ ID NO: 39190 - protein, 18 aa, Homo sapiens
CARHVSDYGGNSGWFDPW

SEQ ID NO: 39191 - protein, 18 aa, Homo sapiens
CARDSVDSGYDPYPFDYW

SEQ ID NO: 39192 - protein, 20 aa, Homo sapiens
CARRSVYCSGGSCYFFVDYW

SEQ ID NO: 39193 - protein, 18 aa, Homo sapiens
CARTQWVAAAGTSWFDPW

SEQ ID NO: 39194 - protein, 21 aa, Homo sapiens
CARSFWDTAMVTGYYYGMDVW

SEQ ID NO: 39195 - protein, 17 aa, Homo sapiens
CARVKQGPVGATDFDYW

SEQ ID NO: 39196 - protein, 16 aa, Homo sapiens
CATSSIFGVTNWFDPW

SEQ ID NO: 39197 - protein, 20 aa, Homo sapiens
CAVDYGDLTNYYYYYGMDVW

SEQ ID NO: 39198 - protein, 29 aa, Homo sapiens
CAKELGYCTNGVCYVGDLFYYYYYGMDVW

SEQ ID NO: 39199 - protein, 27 aa, Homo sapiens
CARGLYYGSGSNYNAKDYSYYYGMDVW

SEQ ID NO: 39200 - protein, 19 aa, Homo sapiens
CARDFYGNSGYYSPGFDYW

SEQ ID NO: 39201 - protein, 14 aa, Homo sapiens
CVKGSIAIIDSDYW

SEQ ID NO: 39202 - protein, 23 aa, Homo sapiens
CAKDGAHVVRGVMNYYYYGMDVW

SEQ ID NO: 39203 - protein, 15 aa, Homo sapiens
CARLPTVPNGWFDPW

SEQ ID NO: 39204 - protein, 23 aa, Homo sapiens
CARSQLSRGCSGGSCYSAAFDPW

SEQ ID NO: 39205 - protein, 23 aa, Homo sapiens
CAREKSTYDSSGYYYYYYGMDVW

SEQ ID NO: 39206 - protein, 23 aa, Homo sapiens
CARDRGVDYYDSSGYYPGAFDIW

SEQ ID NO: 39207 - protein, 16 aa, Homo sapiens
CTTDHSYYYDSRGDYW

SEQ ID NO: 39208 - protein, 18 aa, Homo sapiens
CARDPGRGYSYGTTVDYW

SEQ ID NO: 39209 - protein, 25 aa, Homo sapiens
CARIRTQELRYFDWSWGPTPLFDYW

SEQ ID NO: 39210 - protein, 21 aa, Homo sapiens
CARLGTRYFDWSPRYNWFDPW

SEQ ID NO: 39211 - protein, 30 aa, Homo sapiens
CAREKVFQDSLPRGFGVVIIYYYYYGMDVW

SEQ ID NO: 39212 - protein, 21 aa, Homo sapiens
CAKGEYQLLRRDYYYYGMDVW

SEQ ID NO: 39213 - protein, 19 aa, Homo sapiens
CARGYWDSSSWYGYYFDYW

SEQ ID NO: 39214 - protein, 27 aa, Homo sapiens
CARDRRHYYDSSGYYDNYYYYYGMDVW

SEQ ID NO: 39215 - protein, 17 aa, Homo sapiens
CARVNTMIVVVTYFDYW

SEQ ID NO: 39216 - protein, 12 aa, Homo sapiens
CQSLDSSNHVIF

SEQ ID NO: 39217 - protein, 26 aa, Homo sapiens
CARDQPATHYDILTGYKHSQNWFDPW

SEQ ID NO: 39218 - protein, 17 aa, Homo sapiens
CARHSAWSGWSSCFDSW

SEQ ID NO: 39219 - protein, 25 aa, Homo sapiens
CARGRHQRGSGYGPVYYYYYGMDVW

SEQ ID NO: 39220 - protein, 18 aa, Homo sapiens
CARDASYYSSSGPWFDPW

SEQ ID NO: 39221 - protein, 23 aa, Homo sapiens
CTRGIVGATIAGRRKVVRDFDYW

SEQ ID NO: 39222 - protein, 25 aa, Homo sapiens
CARDPRLGDSSGYYYVTYYYGMDVW

SEQ ID NO: 39223 - protein, 18 aa, Homo sapiens
CAKGGPIVGAPDDAFDIW

SEQ ID NO: 39224 - protein, 26 aa, Homo sapiens
CAKDFARPYYDFWSGYYEVDAFFDYW

SEQ ID NO: 39225 - protein, 19 aa, Homo sapiens
CARSYLNYYDSSGYGFDYW

SEQ ID NO: 39226 - protein, 30 aa, Homo sapiens
CARDFKYYDFWSGYLPNHPVEQYYYGMDVW

SEQ ID NO: 39227 - protein, 24 aa, Homo sapiens
CAKAKLTYYYGSGSYGPQNWFDPW

SEQ ID NO: 39228 - protein, 21 aa, Homo sapiens
CATQPPGLRYFDWLIDPIDYW

SEQ ID NO: 39229 - protein, 20 aa, Homo sapiens
CARDPGDGDPNYYYYGMDVW

SEQ ID NO: 39230 - protein, 21 aa, Homo sapiens
CAKDKEAWNYGLHYSYYMDVW

SEQ ID NO: 39231 - protein, 16 aa, Homo sapiens
CATGGSSGHSNWFDPW

SEQ ID NO: 39232 - protein, 18 aa, Homo sapiens
CARDWFDYGDYPTYFDYW

SEQ ID NO: 39233 - protein, 21 aa, Homo sapiens
CARDSDYYDFWSGYSFGLDYW

SEQ ID NO: 39234 - protein, 13 aa, Homo sapiens
CAREVITGDFDSW

SEQ ID NO: 39235 - protein, 30 aa, Homo sapiens
CTTDRWNLEYRESDYGDYEDYYHYFGMDVW

SEQ ID NO: 39236 - protein, 19 aa, Homo sapiens
CARESRDSRGYHHWYFDFW

SEQ ID NO: 39237 - protein, 15 aa, Homo sapiens
CARGAGNGCCDFDPW

SEQ ID NO: 39238 - protein, 22 aa, Homo sapiens
CASSRPRRIAMVVTAITHFDYW

SEQ ID NO: 39239 - protein, 19 aa, Homo sapiens
CARGRYSSSWADLERFDYW

SEQ ID NO: 39240 - protein, 9 aa, Homo sapiens
CLQHDNFRF

SEQ ID NO: 39241 - protein, 32 aa, Homo sapiens
CAREVWDYDSSGYQGLVFVLSGSPPNAHFDYW

SEQ ID NO: 39242 - protein, 17 aa, Homo sapiens
CATGTPQQGSFGWFDPW

SEQ ID NO: 39243 - protein, 16 aa, Homo sapiens
CAKDQATVKLSWFDPW

SEQ ID NO: 39244 - protein, 28 aa, Homo sapiens
CARAALYDPWIQLWERSIYYYYYGMDVW

SEQ ID NO: 39245 - protein, 21 aa, Homo sapiens
CARHAKARYFDWLSEYYFDYW

SEQ ID NO: 39246 - protein, 22 aa, Homo sapiens
CARLGSIDYYDSSGYSNYFDYW

SEQ ID NO: 39247 - protein, 21 aa, Homo sapiens
CARAKLLWFGELRRVGWFDPW

SEQ ID NO: 39248 - protein, 12 aa, Homo sapiens
CARGQQVEIDYW

SEQ ID NO: 39249 - protein, 20 aa, Homo sapiens
CAKEDLLSMIVVVIPLLDYW

SEQ ID NO: 39250 - protein, 15 aa, Homo sapiens
CARELYIWGRCFDYW

SEQ ID NO: 39251 - protein, 22 aa, Homo sapiens
CARDRPFAGYSSSWYDISLDYW

SEQ ID NO: 39252 - protein, 27 aa, Homo sapiens
CARLVGYDYVWGSYRYTGMRDLRFDYW

SEQ ID NO: 39253 - protein, 16 aa, Homo sapiens
CARPIDYNSLGACDIW

SEQ ID NO: 39254 - protein, 17 aa, Homo sapiens
CAKDPYYGGKGNWFDPW

SEQ ID NO: 39255 - protein, 21 aa, Homo sapiens
CARDSPWGSTYYYYYYGMDVW

SEQ ID NO: 39256 - protein, 13 aa, Homo sapiens
CSRGRLYDPSDYW

SEQ ID NO: 39257 - protein, 18 aa, Homo sapiens
CAKVYYDSSGYPVAFDYW

SEQ ID NO: 39258 - protein, 19 aa, Homo sapiens
CATGPGQLVPESFGWFDPW

SEQ ID NO: 39259 - protein, 23 aa, Homo sapiens
CATASPFDTIFGVVITPNWFDPW

SEQ ID NO: 39260 - protein, 18 aa, Homo sapiens
CARPEAAAGEHRNWFDPW

SEQ ID NO: 39261 - protein, 18 aa, Homo sapiens
CTMTYYDILTGYLAFDYW

SEQ ID NO: 39262 - protein, 20 aa, Homo sapiens
CARDSSSWYGREYYYGMDVW

SEQ ID NO: 39263 - protein, 16 aa, Homo sapiens
CAREGRTSGTSSYDYW

SEQ ID NO: 39264 - protein, 21 aa, Homo sapiens
CARQAIRGIVVVTRPRHFDYW

SEQ ID NO: 39265 - protein, 21 aa, Homo sapiens
CARDFNGNLVHFYYYYGMDVW

SEQ ID NO: 39266 - protein, 22 aa, Homo sapiens
CARVQGIYYDTTGSFRRYFDLW

SEQ ID NO: 39267 - protein, 18 aa, Homo sapiens
CARLHRSYGVSYVAFDIW

SEQ ID NO: 39268 - protein, 22 aa, Homo sapiens
CARDPYYYDSSGYYGEKLSDYW

SEQ ID NO: 39269 - protein, 16 aa, Homo sapiens
CAREGEMTTVTVFDYW

SEQ ID NO: 39270 - protein, 22 aa, Homo sapiens
CARAKRITIFGVVIIPGVFDYW

SEQ ID NO: 39271 - protein, 21 aa, Homo sapiens
CVTGAVVAATKPYYYYGMDVW

SEQ ID NO: 39272 - protein, 20 aa, Homo sapiens
CARERGGFGELSGPDAFDIW

SEQ ID NO: 39273 - protein, 25 aa, Homo sapiens
CARDHSGHNYDSSGKRARLNWLDPW

SEQ ID NO: 39274 - protein, 17 aa, Homo sapiens
CAKEVWFGEPDPYFDYW

SEQ ID NO: 39275 - protein, 21 aa, Homo sapiens
CARERTNYYDSSGYQSALDYW

SEQ ID NO: 39276 - protein, 14 aa, Homo sapiens
CAKYYGDFHYFDYW

SEQ ID NO: 39277 - protein, 16 aa, Homo sapiens
CARDPDYTDDWYFDVW

SEQ ID NO: 39278 - protein, 24 aa, Homo sapiens
CARERLPRIALNFNNYYYYGMDVW

SEQ ID NO: 39279 - protein, 22 aa, Homo sapiens
CARGLLYSSTWSPNYYYGMDVW

SEQ ID NO: 39280 - protein, 22 aa, Homo sapiens
CASHDFWSGYYDEYYYYGMDVW

SEQ ID NO: 39281 - protein, 19 aa, Homo sapiens
CARNSYSDSGSNVNYFNYW

SEQ ID NO: 39282 - protein, 17 aa, Homo sapiens
CARDYYDSSGYAAFDIW

SEQ ID NO: 39283 - protein, 19 aa, Homo sapiens
CAKDYYDSSGYYNNWFDPW

SEQ ID NO: 39284 - protein, 21 aa, Homo sapiens
CARDWNYYDSSGYYYYGMDVW

SEQ ID NO: 39285 - protein, 25 aa, Homo sapiens
CARDFETYDSSGYPLTMYYYGMDVW

SEQ ID NO: 39286 - protein, 19 aa, Homo sapiens
CVRDLRIGYCSGGNCFDLW

SEQ ID NO: 39287 - protein, 13 aa, Homo sapiens
CAKDVIAVAGDYW

SEQ ID NO: 39288 - protein, 18 aa, Homo sapiens
CATGPGVGATGGHWFDPW

SEQ ID NO: 39289 - protein, 22 aa, Homo sapiens
CATDSYDILTGYYYYYYGMDVW

SEQ ID NO: 39290 - protein, 19 aa, Homo sapiens
CARHVAVYGDHLYWYLDLW

SEQ ID NO: 39291 - protein, 33 aa, Homo sapiens
CARDEKSGYDILTGYYFGSSIIGYYYYYGMDVW

SEQ ID NO: 39292 - protein, 13 aa, Homo sapiens
CARGGGTYYFHSW

SEQ ID NO: 39293 - protein, 24 aa, Homo sapiens
CARHPRGTQWLAIYYYYYYGMDVW

SEQ ID NO: 39294 - protein, 18 aa, Homo sapiens
CARDLGGSGYYPDAFDIW

SEQ ID NO: 39295 - protein, 15 aa, Homo sapiens
CARDPRDGYYFMDLW

SEQ ID NO: 39296 - protein, 24 aa, Homo sapiens
CARDFVQRITMIVVVRNYDAFDIW

SEQ ID NO: 39297 - protein, 14 aa, Homo sapiens
CARDPVEMANFDYW

SEQ ID NO: 39298 - protein, 14 aa, Homo sapiens
CQSPDSSGTFTRVF

SEQ ID NO: 39299 - protein, 19 aa, Homo sapiens
CASPLGDFWSGYYSGIDYW

SEQ ID NO: 39300 - protein, 16 aa, Homo sapiens
CAKDQAGSYYGPFDYW

SEQ ID NO: 39301 - protein, 21 aa, Homo sapiens
CVKGRHFDWLLYRIHDAFDIW

SEQ ID NO: 39302 - protein, 20 aa, Homo sapiens
CTKDLLPTVPYYYSYVMDVW

SEQ ID NO: 39303 - protein, 27 aa, Homo sapiens
CARVGYCSSTSCYARGRYYYYYGMDVW

SEQ ID NO: 39304 - protein, 22 aa, Homo sapiens
CARGGGSGWYFGAELKYYFDYW

SEQ ID NO: 39305 - protein, 17 aa, Homo sapiens
CASRLFVAIDRAAFDIW

SEQ ID NO: 39306 - protein, 16 aa, Homo sapiens
CARGNARYKDDAFDIW

SEQ ID NO: 39307 - protein, 25 aa, Homo sapiens
CAKTYKETRITIFGVVILTPYFDYW

SEQ ID NO: 39308 - protein, 21 aa, Homo sapiens
CARWSFYYYDSSGPTQAFDYW

SEQ ID NO: 39309 - protein, 19 aa, Homo sapiens
CARHDAYSSRWEAEYFQHW

SEQ ID NO: 39310 - protein, 27 aa, Homo sapiens
CARDLEIPKYYDFWSGYSLNKQNFDYW

SEQ ID NO: 39311 - protein, 22 aa, Homo sapiens
CARDLPRDGSPRDYYYYGMDVW

SEQ ID NO: 39312 - protein, 20 aa, Homo sapiens
CARDRGYCSGRRCYTVLDYW

SEQ ID NO: 39313 - protein, 19 aa, Homo sapiens
CATTRGWLQFGSSSTFDYW

SEQ ID NO: 39314 - protein, 21 aa, Homo sapiens
CARDMGNTIFGVVIESAFDIW

SEQ ID NO: 39315 - protein, 28 aa, Homo sapiens
CARHTPPILVDGYDILTGYYPGSFFDYW

SEQ ID NO: 39316 - protein, 24 aa, Homo sapiens
CAKSSLTRSSSWYTPYYYYGMDVW

SEQ ID NO: 39317 - protein, 15 aa, Homo sapiens
CARGNIAAAGEFDYW

SEQ ID NO: 39318 - protein, 15 aa, Homo sapiens
CASAHSSSGPNFDDW

SEQ ID NO: 39319 - protein, 21 aa, Homo sapiens
CAKGHDSSGYDWGVFWYFDLW

SEQ ID NO: 39320 - protein, 14 aa, Homo sapiens
CSSYAGSNNFRVVF

SEQ ID NO: 39321 - protein, 18 aa, Homo sapiens
CAKTYYYDSSGYGPLDYW

SEQ ID NO: 39322 - protein, 20 aa, Homo sapiens
CAFTGYSSGWYGYYYGMDVW

SEQ ID NO: 39323 - protein, 15 aa, Homo sapiens
CARDLIAAPPYFDYW

SEQ ID NO: 39324 - protein, 23 aa, Homo sapiens
CARVGVVVVPAAIDYYYYGMDVW

SEQ ID NO: 39325 - protein, 21 aa, Homo sapiens
CAHTYYYDSSGYYYRYYFDYW

SEQ ID NO: 39326 - protein, 23 aa, Homo sapiens
CAKVRSIYYDFWSGPRTYYFDYW

SEQ ID NO: 39327 - protein, 21 aa, Homo sapiens
CARHAGYTAMVIYYYYGMDVW

SEQ ID NO: 39328 - protein, 25 aa, Homo sapiens
CARGSARNYDILTGYVYYYYGMDVW

SEQ ID NO: 39329 - protein, 18 aa, Homo sapiens
CARGDIAAAGYEYYFDYW

SEQ ID NO: 39330 - protein, 19 aa, Homo sapiens
CARSTHTGFLEWLSWFDPW

SEQ ID NO: 39331 - protein, 18 aa, Homo sapiens
CARGERHYGTARFYFDDW

SEQ ID NO: 39332 - protein, 14 aa, Homo sapiens
CARVGSGSGPFDIW

SEQ ID NO: 39333 - protein, 26 aa, Homo sapiens
CARDVRNRLYYYDSSGYDAEPYFDYW

SEQ ID NO: 39334 - protein, 22 aa, Homo sapiens
CARLNLPPELPLDYYYYGMDVW

SEQ ID NO: 39335 - protein, 25 aa, Homo sapiens
CARLGHADGILWYGESATDYHYDYW

SEQ ID NO: 39336 - protein, 17 aa, Homo sapiens
CARDLSSSWYENYFDYW

SEQ ID NO: 39337 - protein, 20 aa, Homo sapiens
CARDRILLWFGDSNSEFDYW

SEQ ID NO: 39338 - protein, 12 aa, Homo sapiens
CAKDQRGHFDYW

SEQ ID NO: 39339 - protein, 21 aa, Homo sapiens
CARDGDYYDSSGYPTWYFDYW

SEQ ID NO: 39340 - protein, 21 aa, Homo sapiens
CARSIVVVPAAPWYYYGMDVW

SEQ ID NO: 39341 - protein, 24 aa, Homo sapiens
CARHERIILRYFDWFQGGYYFDYW

SEQ ID NO: 39342 - protein, 17 aa, Homo sapiens
CARASSSWWPVEYFDYW

SEQ ID NO: 39343 - protein, 16 aa, Homo sapiens
CAKGSGYSYGHNLDYW

SEQ ID NO: 39344 - protein, 18 aa, Homo sapiens
CAKDPPGQWLTNVIEDYW

SEQ ID NO: 39345 - protein, 18 aa, Homo sapiens
CATDSVVTLQPYNWFDPW

SEQ ID NO: 39346 - protein, 17 aa, Homo sapiens
CVRWLHTGDFSDAFDLW

SEQ ID NO: 39347 - protein, 23 aa, Homo sapiens
CVRDQVRTVPSPPYYYYYGMDVW

SEQ ID NO: 39348 - protein, 25 aa, Homo sapiens
CASSKFVQVVTAQGHYYYYYGMDVW

SEQ ID NO: 39349 - protein, 21 aa, Homo sapiens
CARGASGVTGYSSSSGAFDIW

SEQ ID NO: 39350 - protein, 18 aa, Homo sapiens
CARHPARSNYYYYGMDVW

SEQ ID NO: 39351 - protein, 18 aa, Homo sapiens
CARHYSDGVVTSMEFDYW

SEQ ID NO: 39352 - protein, 21 aa, Homo sapiens
CARVQDSSSSVNYYYYGMDVW

SEQ ID NO: 39353 - protein, 14 aa, Homo sapiens
CARMGSIAVALDYW

SEQ ID NO: 39354 - protein, 23 aa, Homo sapiens
CARASTYYYDSSGYYQHYGMDVW

SEQ ID NO: 39355 - protein, 18 aa, Homo sapiens
CARDHSATVTPYNWFDPW

SEQ ID NO: 39356 - protein, 18 aa, Homo sapiens
CASHRKSYGSGKDAFDIW

SEQ ID NO: 39357 - protein, 18 aa, Homo sapiens
CARHELGVYPDQYYFQFW

SEQ ID NO: 39358 - protein, 20 aa, Homo sapiens
CARDPEVHVVRDGYNLFDYW

SEQ ID NO: 39359 - protein, 11 aa, Homo sapiens [sequence omitted]

SEQ ID NO: 39360 - protein, 18 aa, Homo sapiens
CATLITTSGNPYDGLDIW

SEQ ID NO: 39361 - protein, 24 aa, Homo sapiens
CARAFPNYYDSSGYYFPWEYFQHW

SEQ ID NO: 39362 - protein, 18 aa, Homo sapiens
CARGGGYEIHYYYGMDVW

SEQ ID NO: 39363 - protein, 15 aa, Homo sapiens
CARVAVAAAAVPDYW

SEQ ID NO: 39364 - protein, 12 aa, Homo sapiens
CMQGTHWPPFSF

SEQ ID NO: 39365 - protein, 22 aa, Homo sapiens
CARAALNTIFGVVTHPAAFDIW

SEQ ID NO: 39366 - protein, 19 aa, Homo sapiens
CAHRHMYSSSWYWNAFDIW

SEQ ID NO: 39367 - protein, 16 aa, Homo sapiens
CTRISGCHGAEFFQHW

SEQ ID NO: 39368 - protein, 14 aa, Homo sapiens
CTRDDFWSGYYDYW

SEQ ID NO: 39369 - protein, 16 aa, Homo sapiens
CARDRPTGYYYYMDVW

SEQ ID NO: 39370 - protein, 17 aa, Homo sapiens
CASGYNSGWSPDALDMW

SEQ ID NO: 39371 - protein, 19 aa, Homo sapiens
CAKDGERGYSYALSAFDIW

SEQ ID NO: 39372 - protein, 16 aa, Homo sapiens
CASKLPLRTQNWFDPW

SEQ ID NO: 39373 - protein, 22 aa, Homo sapiens
CARSMDTWIQLWLRKGDAFDIW

SEQ ID NO: 39374 - protein, 24 aa, Homo sapiens
CASDLEISAGGSGSYYRSGFLDYW

SEQ ID NO: 39375 - protein, 22 aa, Homo sapiens
CARSRYNYVWGSYRLKPTFDYW

SEQ ID NO: 39376 - protein, 17 aa, Homo sapiens
CARDLPLWLTTSRFDYW

SEQ ID NO: 39377 - protein, 18 aa, Homo sapiens
CARQGIAVADTQGAFDIW

SEQ ID NO: 39378 - protein, 14 aa, Homo sapiens
CAREAEAGTYFTSW

SEQ ID NO: 39379 - protein, 17 aa, Homo sapiens
CARTLTFGGVIAHFDYW

SEQ ID NO: 39380 - protein, 17 aa, Homo sapiens
CAREGVVYSSSSAQDYW

SEQ ID NO: 39381 - protein, 22 aa, Homo sapiens
CARVPSPTWIGHQYYYFGMDVW

SEQ ID NO: 39382 - protein, 26 aa, Homo sapiens
CARDSPRPYYYDSSGYYYTWGYFQHW

SEQ ID NO: 39383 - protein, 25 aa, Homo sapiens
CARGKSRLRIVVVIIPYYYYGMDVW

SEQ ID NO: 39384 - protein, 17 aa, Homo sapiens
CAKPKDRAAARSDFDIW

SEQ ID NO: 39385 - protein, 26 aa, Homo sapiens
CAKENYENKITYCSGYSCYYNAFDIW

SEQ ID NO: 39386 - protein, 16 aa, Homo sapiens
CARIPSIAVAGYIDYW

SEQ ID NO: 39387 - protein, 17 aa, Homo sapiens
CSRPPYTYSYISAFDIW

SEQ ID NO: 39388 - protein, 18 aa, Homo sapiens
CARGVWFGELLSPDFDYW

SEQ ID NO: 39389 - protein, 16 aa, Homo sapiens
CARHRGLFQKDAFDVW

SEQ ID NO: 39390 - protein, 14 aa, Homo sapiens
CATLRDAAMAYDYW

SEQ ID NO: 39391 - protein, 16 aa, Homo sapiens
CAKDSGSRTWYYFDNW

SEQ ID NO: 39392 - protein, 18 aa, Homo sapiens
CARDFRSIAASGTHFDYW

SEQ ID NO: 39393 - protein, 17 aa, Homo sapiens
CAKGYGVVVTATPYDYW

SEQ ID NO: 39394 - protein, 23 aa, Homo sapiens
CARALKYDYGLGTPGVVYYFQYW

SEQ ID NO: 39395 - protein, 20 aa, Homo sapiens
CARQRDYYGSGTYIRWFDPW

SEQ ID NO: 39396 - protein, 17 aa, Homo sapiens
CARQGGPGIAAAGFDYW

SEQ ID NO: 39397 - protein, 16 aa, Homo sapiens
CATAPTYGPGGRFDFW

SEQ ID NO: 39398 - protein, 19 aa, Homo sapiens
CAKGYYDGSGYRLSFVDYW

SEQ ID NO: 39399 - protein, 21 aa, Homo sapiens
CARLVTWEYDILTAQHFFDSW

SEQ ID NO: 39400 - protein, 17 aa, Homo sapiens
CARERAGQFAPNYFDFW

SEQ ID NO: 39401 - protein, 14 aa, Homo sapiens
CARGRSLFSDFDLW

SEQ ID NO: 39402 - protein, 15 aa, Homo sapiens
CARDSFYYGPRYDYW

SEQ ID NO: 39403 - protein, 23 aa, Homo sapiens
CAREDLYSSSWYALDYYYYMDVW

SEQ ID NO: 39404 - protein, 15 aa, Homo sapiens
CSREGDIETTEWDYW

SEQ ID NO: 39405 - protein, 20 aa, Homo sapiens
CARAVEDYGDYYPDPQLDYW

SEQ ID NO: 39406 - protein, 21 aa, Homo sapiens
CARAPIKHYYGSGSTRWFDPW

SEQ ID NO: 39407 - protein, 21 aa, Homo sapiens
CALYSSGWYSGRYYYYGMDVW

SEQ ID NO: 39408 - protein, 17 aa, Homo sapiens
CATLLLTLKPGDAFDFW

SEQ ID NO: 39409 - protein, 19 aa, Homo sapiens
CAKRAGATPLTTGRAFDYW

SEQ ID NO: 39410 - protein, 15 aa, Homo sapiens
CARTRVLLTSHIDYW

SEQ ID NO: 39411 - protein, 26 aa, Homo sapiens
CARDREYYDYVWGSALGGLAAVNDYW

SEQ ID NO: 39412 - protein, 22 aa, Homo sapiens
CARLRDGRGSGHYYYYYYMDVW

SEQ ID NO: 39413 - protein, 19 aa, Homo sapiens
CAKVPHVAYALAYSAFDIW

SEQ ID NO: 39414 - protein, 19 aa, Homo sapiens
CAKGFSGSSNWLQYYFDHW

SEQ ID NO: 39415 - protein, 20 aa, Homo sapiens
CTTDWYSSGWYLKPNAFDIW

SEQ ID NO: 39416 - protein, 25 aa, Homo sapiens
CARGWGLGSPLRYFDWSPGYYFDYW

SEQ ID NO: 39417 - protein, 16 aa, Homo sapiens
CAKGTSGWYYYGMDVW

SEQ ID NO: 39418 - protein, 14 aa, Homo sapiens
CARAEGGYDDFDYW

SEQ ID NO: 39419 - protein, 17 aa, Homo sapiens
CARTGIVATRQRPFDYW

SEQ ID NO: 39420 - protein, 17 aa, Homo sapiens
CAKASIGLMVAGSFDLW

SEQ ID NO: 39421 - protein, 15 aa, Homo sapiens
CARHAPRSAEYFQHW

SEQ ID NO: 39422 - protein, 14 aa, Homo sapiens
CARGRSGAYDFDYW

SEQ ID NO: 39423 - protein, 18 aa, Homo sapiens
CARLKSPHFGSGSYFDYW

SEQ ID NO: 39424 - protein, 25 aa, Homo sapiens
CASRSESVTLRFLEWLSIYWYFDLW

SEQ ID NO: 39425 - protein, 17 aa, Homo sapiens
CARCLGSSSWYRWFDPW

SEQ ID NO: 39426 - protein, 16 aa, Homo sapiens
CVRDMAMEDGGVRDYW

SEQ ID NO: 39427 - protein, 19 aa, Homo sapiens
CAHRRVGSGYDQEDAFDIW

SEQ ID NO: 39428 - protein, 17 aa, Homo sapiens
CVKAMYRTVADTSFDYW

SEQ ID NO: 39429 - protein, 28 aa, Homo sapiens
CARGDVSKKRLLWFGELLSARRGAFDIW

SEQ ID NO: 39430 - protein, 19 aa, Homo sapiens
CARGGAWGYSYGNWYFDLW

SEQ ID NO: 39431 - protein, 24 aa, Homo sapiens
CAKDPFVLRYFDWSYGAIDGFDIW

SEQ ID NO: 39432 - protein, 15 aa, Homo sapiens [sequence omitted]

SEQ ID NO: 39433 - protein, 16 aa, Homo sapiens
CARGVLGERSVGFDYW

SEQ ID NO: 39434 - protein, 23 aa, Homo sapiens
CARGFYGSGSLRHRPRWGNFDYW

SEQ ID NO: 39435 - protein, 19 aa, Homo sapiens
CARGMYYGSVNYFYAFDIW

SEQ ID NO: 39436 - protein, 14 aa, Homo sapiens
CARDMVRDEGFDMW

SEQ ID NO: 39437 - protein, 14 aa, Homo sapiens
CANFVKGNWYFDLW

SEQ ID NO: 39438 - protein, 21 aa, Homo sapiens
CARVNCEELWLRLYYYYMDVW

SEQ ID NO: 39439 - protein, 22 aa, Homo sapiens
CARDLLYCTATSCSSFNAFDLW

SEQ ID NO: 39440 - protein, 13 aa, Homo sapiens
CARDPVNLPFDYW

SEQ ID NO: 39441 - protein, 19 aa, Homo sapiens
CTTDPPPRYYYLLDYFDYW

SEQ ID NO: 39442 - protein, 19 aa, Homo sapiens
CATIGVPWGWDGDRHFDYW

SEQ ID NO: 39443 - protein, 19 aa, Homo sapiens
CARDGYTWDTAMVGAFDIW

SEQ ID NO: 39444 - protein, 16 aa, Homo sapiens
CAKGVQLWPTYYFDYW

SEQ ID NO: 39445 - protein, 22 aa, Homo sapiens
CAKARFTLGYCSGGSCSYFDYW

SEQ ID NO: 39446 - protein, 16 aa, Homo sapiens
CARESDPYSGYAVDYW

SEQ ID NO: 39447 - protein, 26 aa, Homo sapiens
CAKEDIVVVPAALGFSLYYYYYMDVW

SEQ ID NO: 39448 - protein, 18 aa, Homo sapiens
CARASTAFWYEPYYFDYW

SEQ ID NO: 39449 - protein, 15 aa, Homo sapiens
CARARFGELLMVDYW

SEQ ID NO: 39450 - protein, 18 aa, Homo sapiens
CARGSRGTLSGGPWFDPW

SEQ ID NO: 39451 - protein, 26 aa, Homo sapiens
CARWAHYDYVWGSYRKYWTVYYFDYW

SEQ ID NO: 39452 - protein, 19 aa, Homo sapiens
CARHSPATGRIVATISDYW

SEQ ID NO: 39453 - protein, 15 aa, Homo sapiens
CATTSSDWYYVFDIW

SEQ ID NO: 39454 - protein, 11 aa, Homo sapiens
CHQYYSGPFSF

SEQ ID NO: 39455 - protein, 20 aa, Homo sapiens
CARDPEGMYYYDSSGSGDYW

SEQ ID NO: 39456 - protein, 14 aa, Homo sapiens
CQVWDSRGDHPRVF

SEQ ID NO: 39457 - protein, 19 aa, Homo sapiens
CASWGYYYESSGYSYFDYW

SEQ ID NO: 39458 - protein, 19 aa, Homo sapiens
CTTHSWAYGSGTPSSFDHW

SEQ ID NO: 39459 - protein, 21 aa, Homo sapiens
CARGRGSGSYYRLTRSAFDYW

SEQ ID NO: 39460 - protein, 20 aa, Homo sapiens
CARAWYPPFHRGGVYYFDYW

SEQ ID NO: 39461 - protein, 22 aa, Homo sapiens
CARMSLAKPTYGDYVVDAFDIW

SEQ ID NO: 39462 - protein, 17 aa, Homo sapiens
CAHSRTAPGYKYYFDHW

SEQ ID NO: 39463 - protein, 19 aa, Homo sapiens
CARHLRRWLQLRPTFFDYW

SEQ ID NO: 39464 - protein, 21 aa, Homo sapiens
CASPHYYDILTGYAQDAFDIW

SEQ ID NO: 39465 - protein, 24 aa, Homo sapiens
CARLARGGMVRHADWIPFDPFDLW

SEQ ID NO: 39466 - protein, 21 aa, Homo sapiens
CARENDEVIVVLYYYYGMDVW

SEQ ID NO: 39467 - protein, 22 aa, Homo sapiens
CARQRIRYYHGSGSYPDAFDFW

SEQ ID NO: 39468 - protein, 19 aa, Homo sapiens
CASLPYSFTVGSPYYFYHW

SEQ ID NO: 39469 - protein, 17 aa, Homo sapiens
CAKGEYSNYVLYAFDIW

SEQ ID NO: 39470 - protein, 23 aa, Homo sapiens
CARRTLPRITIFGVVPNWYFDLW

SEQ ID NO: 39471 - protein, 17 aa, Homo sapiens
CARDCSGGRCYPWFDPW

SEQ ID NO: 39472 - protein, 17 aa, Homo sapiens
CAGSYGSGSYYWSLDYW

SEQ ID NO: 39473 - protein, 12 aa, Homo sapiens
CQHSYNTPTITF

SEQ ID NO: 39474 - protein, 18 aa, Homo sapiens
CATDFMITFRGLEAFDIW

SEQ ID NO: 39475 - protein, 18 aa, Homo sapiens
CARHDPQYGGLPPHFDYW

SEQ ID NO: 39476 - protein, 22 aa, Homo sapiens
CASRQRDYDFWSGYHDNAFDIW

SEQ ID NO: 39477 - protein, 21 aa, Homo sapiens
CAHYYYDSSGYYVEGLYFDYW

SEQ ID NO: 39478 - protein, 14 aa, Homo sapiens
CARVGIREGNFDYW

SEQ ID NO: 39479 - protein, 17 aa, Homo sapiens
CARRRSIVATDDAFDIW

SEQ ID NO: 39480 - protein, 17 aa, Homo sapiens
CARGYSGYVWGWYFDLW

SEQ ID NO: 39481 - protein, 19 aa, Homo sapiens
CARENGYYDSRISWAFDIW

SEQ ID NO: 39482 - protein, 19 aa, Homo sapiens
CAREGGYYGSGTYGGFDIW

SEQ ID NO: 39483 - protein, 12 aa, Homo sapiens
CARKSLDAFDLW

SEQ ID NO: 39484 - protein, 24 aa, Homo sapiens
CARDWEPFYDNLTGFFGSKAWDIW

SEQ ID NO: 39485 - protein, 21 aa, Homo sapiens
CARPNDGGNGWLPAYDAIDFW

SEQ ID NO: 39486 - protein, 18 aa, Homo sapiens
CAKPASTYYDSSGYYDYW

SEQ ID NO: 39487 - protein, 18 aa, Homo sapiens
CARDESSSWYVSLPGDYW

SEQ ID NO: 39488 - protein, 38 aa, Homo sapiens
CLRAEDTAVYYCARDREDCSSTSCRWGWYYYYYGMDVW

SEQ ID NO: 39489 - protein, 13 aa, Homo sapiens
CATPLHYGAADYW

SEQ ID NO: 39490 - protein, 19 aa, Homo sapiens
CARAAFLVDSALVPYFDYW

SEQ ID NO: 39491 - protein, 11 aa, Homo sapiens
CMQDAQDVFTF

SEQ ID NO: 39492 - protein, 20 aa, Homo sapiens
CAKMSHYGIVNDGDWYFDLW

SEQ ID NO: 39493 - protein, 12 aa, Homo sapiens
CAKSDSSGFYYW

SEQ ID NO: 39494 - protein, 21 aa, Homo sapiens
CARDKRFTIFGVVIEDAFDIW

SEQ ID NO: 39495 - protein, 19 aa, Homo sapiens
CTTDLQYYDYVWGSRVDYW

SEQ ID NO: 39496 - protein, 19 aa, Homo sapiens
CATLVGATNYYYYYGMDVW

SEQ ID NO: 39497 - protein, 22 aa, Homo sapiens
CARNTRRITIFGVVTNDAFDIW

SEQ ID NO: 39498 - protein, 19 aa, Homo sapiens
CARHAQIWFGETSDAFDIW

SEQ ID NO: 39499 - protein, 17 aa, Homo sapiens
CARDISGDYESIYFDYW

SEQ ID NO: 39500 - protein, 23 aa, Homo sapiens
CARVGATKLLWFGELGFSAFDIW

SEQ ID NO: 39501 - protein, 18 aa, Homo sapiens
CASLYSYYYGSGSHNDYW

SEQ ID NO: 39502 - protein, 15 aa, Homo sapiens
CAKGGTMIVVEIDYW

SEQ ID NO: 39503 - protein, 21 aa, Homo sapiens
CARILQVATIRNYYYYYMDVW

SEQ ID NO: 39504 - protein, 23 aa, Homo sapiens
CAREGILYDYVWGSYRSGGFDYW

SEQ ID NO: 39505 - protein, 18 aa, Homo sapiens
CARGGLLWWREGWYFDLW

SEQ ID NO: 39506 - protein, 13 aa, Homo sapiens
CQHLNNYPRPLTF

SEQ ID NO: 39507 - protein, 22 aa, Homo sapiens
CARGLGDYGSGSYDVYFYFDYW

SEQ ID NO: 39508 - protein, 18 aa, Homo sapiens
CAKTNFGSTWHQTWFDPW

SEQ ID NO: 39509 - protein, 19 aa, Homo sapiens
CARDPYREVAASPLPLDYW

SEQ ID NO: 39510 - protein, 24 aa, Homo sapiens
CARGLKEMGIAVAGYYYYYYMDVW

SEQ ID NO: 39511 - protein, 18 aa, Homo sapiens
CARYRRGWPQFAGYFQHW

SEQ ID NO: 39512 - protein, 26 aa, Homo sapiens
CAKDPSPQYYDFWSGYYIRGYYFDYW

SEQ ID NO: 39513 - protein, 16 aa, Homo sapiens
CAKMGFSRSSWSLDYW

SEQ ID NO: 39514 - protein, 17 aa, Homo sapiens
CTRDLLGFGKFTGFDPW

SEQ ID NO: 39515 - protein, 23 aa, Homo sapiens
CARDRRFLEWLSRGYYYYGMDVW

SEQ ID NO: 39516 - protein, 12 aa, Homo sapiens
CAAIAARSVDYW

SEQ ID NO: 39517 - protein, 18 aa, Homo sapiens
CARNGAIGAQWALVFDPW

SEQ ID NO: 39518 - protein, 21 aa, Homo sapiens
CARVPPGVLWFGEFPNWFDPW

SEQ ID NO: 39519 - protein, 18 aa, Homo sapiens
CAIFRGTGWLRNNWFDPW

SEQ ID NO: 39520 - protein, 17 aa, Homo sapiens
CTRDRSYYDSSGYFGYW

SEQ ID NO: 39521 - protein, 14 aa, Homo sapiens
CARESYDIAAGDYW

SEQ ID NO: 39522 - protein, 14 aa, Homo sapiens
CARQGSWPDNFDYW

SEQ ID NO: 39523 - protein, 20 aa, Homo sapiens
CAKEAYTLHCSSTSCYPDYW

SEQ ID NO: 39524 - protein, 21 aa, Homo sapiens
CAKIGARITMIVVVIGTIDYW

SEQ ID NO: 39525 - protein, 20 aa, Homo sapiens
CTTTSWSSGWYMIYGAFDIW

SEQ ID NO: 39526 - protein, 16 aa, Homo sapiens
CARWYSSPPQTYFDYW

SEQ ID NO: 39527 - protein, 18 aa, Homo sapiens
CARDFRFGGVRGRYFDLW

SEQ ID NO: 39528 - protein, 16 aa, Homo sapiens
CATGLRVDRLSWFDSW

SEQ ID NO: 39529 - protein, 15 aa, Homo sapiens
CATYSGSYKYYFDYW

SEQ ID NO: 39530 - protein, 14 aa, Homo sapiens
CARVSYGGNSFDYW

SEQ ID NO: 39531 - protein, 16 aa, Homo sapiens
CAKDMGIGGWYTFDYW

SEQ ID NO: 39532 - protein, 20 aa, Homo sapiens
CARVPSTVRHFGSGSYWDYW

SEQ ID NO: 39533 - protein, 23 aa, Homo sapiens
CVRDHTYSSSWYGYYYYYYMDVW

SEQ ID NO: 39534 - protein, 14 aa, Homo sapiens
CAKSGSSLVYFQHW

SEQ ID NO: 39535 - protein, 19 aa, Homo sapiens
CALSLLGEVAVAGHYFDYW

SEQ ID NO: 39536 - protein, 16 aa, Homo sapiens
CTRSKDTSMAYAFDIW

SEQ ID NO: 39537 - protein, 23 aa, Homo sapiens
CATSTREIEYVWENYRPDTFDIW

SEQ ID NO: 39538 - protein, 18 aa, Homo sapiens
CARDLYCSGGSCSTFDYW

SEQ ID NO: 39539 - protein, 20 aa, Homo sapiens
CTTYIVVVVAATVYNWFDPW

SEQ ID NO: 39540 - protein, 15 aa, Homo sapiens
CTRDFLAAAVPFDYW

SEQ ID NO: 39541 - protein, 15 aa, Homo sapiens
CAKDIGYSSGCPDYW

SEQ ID NO: 39542 - protein, 22 aa, Homo sapiens
CAGGPVRIVRGIIITANWFDPW

SEQ ID NO: 39543 - protein, 19 aa, Homo sapiens
CAKDAPRYGSGRRYAFDIW

SEQ ID NO: 39544 - protein, 17 aa, Homo sapiens
CAIVIYYDSGSSGFDYW

SEQ ID NO: 39545 - protein, 13 aa, Homo sapiens
CQVWDSITSDPSF

SEQ ID NO: 39546 - protein, 18 aa, Homo sapiens
CARRMVSWRSSWYYFDYW

SEQ ID NO: 39547 - protein, 21 aa, Homo sapiens
CARTHFGVLRYFDWLLSLDYW

SEQ ID NO: 39548 - protein, 13 aa, Homo sapiens
CARGAGELYLDYW

SEQ ID NO: 39549 - protein, 25 aa, Homo sapiens
CARDLRYYDILTGYYGNYYYYMDVW

SEQ ID NO: 39550 - protein, 15 aa, Homo sapiens
CAREGGVRGVISDYW

SEQ ID NO: 39551 - protein, 15 aa, Homo sapiens
CARHGYGSGSYPAYW

SEQ ID NO: 39552 - protein, 23 aa, Homo sapiens
CARDGDDYVWGSYRRYQYAMDVW

SEQ ID NO: 39553 - protein, 15 aa, Homo sapiens
CAKGWFLITNAFDMW

SEQ ID NO: 39554 - protein, 14 aa, Homo sapiens
CTRARAVGDWFDPW

SEQ ID NO: 39555 - protein, 12 aa, Homo sapiens
CLQDSNYPMCSF

SEQ ID NO: 39556 - protein, 17 aa, Homo sapiens
CARCISSSWYGNWLDPW

SEQ ID NO: 39557 - protein, 18 aa, Homo sapiens
CAKDAFSGWYLSVYFDYW

SEQ ID NO: 39558 - protein, 15 aa, Homo sapiens
CARGLPGEPVGFDPW

SEQ ID NO: 39559 - protein, 17 aa, Homo sapiens
CATSSFWFGANDAFDIW

SEQ ID NO: 39560 - protein, 15 aa, Homo sapiens
CARRQSAAGTYFDYW

SEQ ID NO: 39561 - protein, 17 aa, Homo sapiens
CGATTTSYVYYYYVDVW

SEQ ID NO: 39562 - protein, 18 aa, Homo sapiens
CARDAMVTVTQNYYFDLW

SEQ ID NO: 39563 - protein, 20 aa, Homo sapiens
CAKERSWYQPLLYPDAFDIW

SEQ ID NO: 39564 - protein, 15 aa, Homo sapiens
CAHSPNYYGPLFDPW

SEQ ID NO: 39565 - protein, 16 aa, Homo sapiens
CARQEWEAAGTGFDYW

SEQ ID NO: 39566 - protein, 19 aa, Homo sapiens
CARGARGYHFGWGDAFDIW

SEQ ID NO: 39567 - protein, 28 aa, Homo sapiens
CAKLRGSDGYSSSWYATLDYYYYGMDVW

SEQ ID NO: 39568 - protein, 18 aa, Homo sapiens
CTSTPPYYDILTGYNDYW

SEQ ID NO: 39569 - protein, 16 aa, Homo sapiens
CAKSSPPFPGRNFDLW

SEQ ID NO: 39570 - protein, 31 aa, Homo sapiens
CARSAFYRGWEDIVVVPAAIPYYYYYYMDVW

SEQ ID NO: 39571 - protein, 20 aa, Homo sapiens
CAKDLVSSSWYSSTYAFDIW

SEQ ID NO: 39572 - protein, 23 aa, Homo sapiens
CARGGMQLIAAAETYSYHYMDVW

SEQ ID NO: 39573 - protein, 16 aa, Homo sapiens
CARVERAYSNYPFDYW

SEQ ID NO: 39574 - protein, 13 aa, Homo sapiens
CAVETRLLYFSYW

SEQ ID NO: 39575 - protein, 14 aa, Homo sapiens
CAHRSHVYDYFDYW

SEQ ID NO: 39576 - protein, 22 aa, Homo sapiens
CARMRRDFALFYTSSWYYLDYW

SEQ ID NO: 39577 - protein, 15 aa, Homo sapiens
CAKDVRPHEWLIDYW

SEQ ID NO: 39578 - protein, 17 aa, Homo sapiens
CARTLSGLVSTYYFDSW

SEQ ID NO: 39579 - protein, 17 aa, Homo sapiens
CAKASSGIIYFDYFDYW

SEQ ID NO: 39580 - protein, 18 aa, Homo sapiens
CARTYYYDSNGYYYFDYW

SEQ ID NO: 39581 - protein, 17 aa, Homo sapiens
CARMGRASGLIGALDIW

SEQ ID NO: 39582 - protein, 16 aa, Homo sapiens
CARRNGWSRWGTFDYW

SEQ ID NO: 39583 - protein, 20 aa, Homo sapiens
CARDGWSSGWYDRFWYFDYW

SEQ ID NO: 39584 - protein, 17 aa, Homo sapiens
CARIKTVTTGGYYFDYW

SEQ ID NO: 39585 - protein, 17 aa, Homo sapiens
CAKARGGGYYYYLFDYW

SEQ ID NO: 39586 - protein, 19 aa, Homo sapiens
CAKDALPSYGDYLYYFDYW

SEQ ID NO: 39587 - protein, 17 aa, Homo sapiens
CARSPYYFDNTGTFDYW

SEQ ID NO: 39588 - protein, 16 aa, Homo sapiens
CAGEKQNDQGAAFDIW

SEQ ID NO: 39589 - protein, 21 aa, Homo sapiens
CAKDRRTSSLRLTVAGDFDYW

SEQ ID NO: 39590 - protein, 17 aa, Homo sapiens
CARSGTYYMSDWYFDLW

SEQ ID NO: 39591 - protein, 15 aa, Homo sapiens
CARPSGRVAAAVDYW

SEQ ID NO: 39592 - protein, 15 aa, Homo sapiens
CARGLGGSGSPSDYW

SEQ ID NO: 39593 - protein, 16 aa, Homo sapiens
CARRSHDYSGNPFDYW

SEQ ID NO: 39594 - protein, 22 aa, Homo sapiens
CVRDVGTRYCTSLSCYAGLDYW

SEQ ID NO: 39595 - protein, 17 aa, Homo sapiens
CARLTGIFQYGVHFDYW

SEQ ID NO: 39596 - protein, 15 aa, Homo sapiens
CARGGFFYGSAFDIW

SEQ ID NO: 39597 - protein, 17 aa, Homo sapiens
CAHSTYNSWSNVCFDYW

SEQ ID NO: 39598 - protein, 25 aa, Homo sapiens
CARGVRMVRGVIITSYYYYYYMDVW

SEQ ID NO: 39599 - protein, 12 aa, Homo sapiens
CQVWDTISDHLF

SEQ ID NO: 39600 - protein, 18 aa, Homo sapiens
CAKDPTARQYYYYGMDVW

SEQ ID NO: 39601 - protein, 16 aa, Homo sapiens
CARVHQRLLYGAFDMW

SEQ ID NO: 39602 - protein, 17 aa, Homo sapiens
CARGKGPIVRGVILDYW

SEQ ID NO: 39603 - protein, 15 aa, Homo sapiens
CARARGAATRGFDYW

SEQ ID NO: 39604 - protein, 20 aa, Homo sapiens
CARAGGYSYDDRDKHAFDIW

SEQ ID NO: 39605 - protein, 17 aa, Homo sapiens
CARVGLNEGYWSFFDYW

SEQ ID NO: 39606 - protein, 20 aa, Homo sapiens
CARRVRSDPVISADNWMDPW

SEQ ID NO: 39607 - protein, 24 aa, Homo sapiens
CARTLFYDYVWGTHRYQPEAFDIW

SEQ ID NO: 39608 - protein, 18 aa, Homo sapiens
CANERGTGYNSSPTVDYW

SEQ ID NO: 39609 - protein, 25 aa, Homo sapiens
CARGNTMVRGVIIVVPYYYYYMDVW

SEQ ID NO: 39610 - protein, 15 aa, Homo sapiens
CTRDQGWAAMGFDPW

SEQ ID NO: 39611 - protein, 17 aa, Homo sapiens
CARLRGRDYYFSPADYW

SEQ ID NO: 39612 - protein, 18 aa, Homo sapiens
CARLCGGSCYLNDAFDIW

SEQ ID NO: 39613 - protein, 17 aa, Homo sapiens
CARMKAVAGLPYYVDYW

SEQ ID NO: 39614 - protein, 22 aa, Homo sapiens
CAGHRFSSSGSYYNFLGWFDPW

SEQ ID NO: 39615 - protein, 16 aa, Homo sapiens
CARDDDSSYEESFDYW

SEQ ID NO: 39616 - protein, 19 aa, Homo sapiens
CARIRYSSSWYGGFDFDYW

SEQ ID NO: 39617 - protein, 16 aa, Homo sapiens
CAREGGSYSKFAFDIW

SEQ ID NO: 39618 - protein, 20 aa, Homo sapiens
CARDRVGYCSGGSCYPFDYW

SEQ ID NO: 39619 - protein, 22 aa, Homo sapiens
CAKVAGYSSSWREYYHYYMDVW

SEQ ID NO: 39620 - protein, 16 aa, Homo sapiens
CANLPIIETPGVGDYW

SEQ ID NO: 39621 - protein, 12 aa, Homo sapiens
CAGMILGAPDYW

SEQ ID NO: 39622 - protein, 16 aa, Homo sapiens
CAKLNFVSGTRDEDYW

SEQ ID NO: 39623 - protein, 17 aa, Homo sapiens
CARVRSGGYSYGSFDYW

SEQ ID NO: 39624 - protein, 16 aa, Homo sapiens
CARRIYTNGYTWFDSW

SEQ ID NO: 39625 - protein, 15 aa, Homo sapiens
CQVWDNNSDHVQVIF

SEQ ID NO: 39626 - protein, 22 aa, Homo sapiens
CSRVARQWCTSTSCYGDRFDFW

SEQ ID NO: 39627 - protein, 19 aa, Homo sapiens
CARDGGFGWFGELLEFDPW

SEQ ID NO: 39628 - protein, 17 aa, Homo sapiens
CARLPAYQVQYNWFEPW

SEQ ID NO: 39629 - protein, 18 aa, Homo sapiens
CARDSGYRFGVPHPFDPW

SEQ ID NO: 39630 - protein, 17 aa, Homo sapiens
CATDQGSGLYKRHFDLW

SEQ ID NO: 39631 - protein, 16 aa, Homo sapiens
CAKDTRLRHVGYMDVW

SEQ ID NO: 39632 - protein, 17 aa, Homo sapiens
CARIPSGYDWEMFFDYW

SEQ ID NO: 39633 - protein, 19 aa, Homo sapiens
CARHMDYYYDGNGGQFDDW

SEQ ID NO: 39634 - protein, 14 aa, Homo sapiens
CARSNWMYWYFDLW

SEQ ID NO: 39635 - protein, 16 aa, Homo sapiens
CVSTKISTDPYYFTYW

SEQ ID NO: 39636 - protein, 21 aa, Homo sapiens
CARGDWKYNYDSSGYRNFDYW

SEQ ID NO: 39637 - protein, 17 aa, Homo sapiens
CARVRPTTSGPDALDLW

SEQ ID NO: 39638 - protein, 12 aa, Homo sapiens
CAAISIVGQDYW

SEQ ID NO: 39639 - protein, 19 aa, Homo sapiens
CAKDRADTAMVSWSCFDYW

SEQ ID NO: 39640 - protein, 23 aa, Homo sapiens
CARLLRNLSITMVRGVDNWFDPW

SEQ ID NO: 39641 - protein, 22 aa, Homo sapiens
CAKDVGYCSGGSCYSEYYFDYW

SEQ ID NO: 39642 - protein, 24 aa, Homo sapiens
CAKDSGRYSSSWYGYYYYYGMDVW

SEQ ID NO: 39643 - protein, 20 aa, Homo sapiens
CARRNYYDGRGSTMDAFDVW

SEQ ID NO: 39644 - protein, 15 aa, Homo sapiens
CARDPEVYGTYFDYW

SEQ ID NO: 39645 - protein, 15 aa, Homo sapiens
CALIVTDDHDVLDVW

SEQ ID NO: 39646 - protein, 28 aa, Homo sapiens
CARDGPTSPIAAAGNPDDNYYYYGMDVW

SEQ ID NO: 39647 - protein, 22 aa, Homo sapiens
CAHTPPFREGFDWSLPLYFDYW

SEQ ID NO: 39648 - protein, 22 aa, Homo sapiens
CARHGGGITIFGVVTRWGFDPW

SEQ ID NO: 39649 - protein, 19 aa, Homo sapiens
CAREQYSSGWYYGAYMDVW

SEQ ID NO: 39650 - protein, 16 aa, Homo sapiens
CTTEWVRGDPYYFDYW

SEQ ID NO: 39651 - protein, 17 aa, Homo sapiens
CARVYGSDWSSHYHDYW

SEQ ID NO: 39652 - protein, 13 aa, Homo sapiens
CQQRSNRPSEVTF

SEQ ID NO: 39653 - protein, 17 aa, Homo sapiens
CARVLGMWLEQDAFDIW

SEQ ID NO: 39654 - protein, 24 aa, Homo sapiens
CARGNRELLWFGELSVQYWYFDLW

SEQ ID NO: 39655 - protein, 20 aa, Homo sapiens
CAREPARIAVAGTHPGRDYW

SEQ ID NO: 39656 - protein, 20 aa, Homo sapiens
CVKHHLYTTTWDPDNWFDPW

SEQ ID NO: 39657 - protein, 22 aa, Homo sapiens
CARMPRFYDVLTDYYWGPFDHW

SEQ ID NO: 39658 - protein, 22 aa, Homo sapiens
CAKAKTYYYGSGSYLVPYFDYW

SEQ ID NO: 39659 - protein, 18 aa, Homo sapiens
CAKDALVETIGWGYFDFW

SEQ ID NO: 39660 - protein, 20 aa, Homo sapiens
CTREGGGSSWYYYYYYMDVW

SEQ ID NO: 39661 - protein, 16 aa, Homo sapiens
CARDLWFGELSAFDIW

SEQ ID NO: 39662 - protein, 15 aa, Homo sapiens
CARYTRNDDYILDYW

SEQ ID NO: 39663 - protein, 16 aa, Homo sapiens
CARIIEGYSYGYGAYW

SEQ ID NO: 39664 - protein, 19 aa, Homo sapiens
CARDKGDSSGYDYPYFDNW

SEQ ID NO: 39665 - protein, 26 aa, Homo sapiens
CASALINYDFWSGSTPHYYYYGMDVW

SEQ ID NO: 39666 - protein, 23 aa, Homo sapiens
CARDLSAYYYGSGSFFHDAFDIW

SEQ ID NO: 39667 - protein, 21 aa, Homo sapiens
CARTLIDDFWSGYAVDAFDIW

SEQ ID NO: 39668 - protein, 21 aa, Homo sapiens
CARLSRDMIFGVLIKTHFDYW

SEQ ID NO: 39669 - protein, 20 aa, Homo sapiens
CARGNGYYYDSSPYYLTDYW

SEQ ID NO: 39670 - protein, 16 aa, Homo sapiens
CARHISSGWYRAFDYW

SEQ ID NO: 39671 - protein, 18 aa, Homo sapiens
CAHLAAIGRQFRYYFDSW

SEQ ID NO: 39672 - protein, 13 aa, Homo sapiens
CALSGVGGYFDYW

SEQ ID NO: 39673 - protein, 17 aa, Homo sapiens
CATYCSRTRCYRNFDYW

SEQ ID NO: 39674 - protein, 14 aa, Homo sapiens
CAKETESSGWFHYW

SEQ ID NO: 39675 - protein, 21 aa, Homo sapiens
CTTLRNSLGMDRWYLNYFHSW

SEQ ID NO: 39676 - protein, 17 aa, Homo sapiens
CARGRGCSTNSCYPDYW

SEQ ID NO: 39677 - protein, 22 aa, Homo sapiens
CARAPGMIVVVPIEAISAFDIW

SEQ ID NO: 39678 - protein, 21 aa, Homo sapiens
CARAIMYEVAGLVRFHAFDIW

SEQ ID NO: 39679 - protein, 17 aa, Homo sapiens
CAKDYSSSSWYGQFDYW

SEQ ID NO: 39680 - protein, 17 aa, Homo sapiens
CAKDLRGISPFNWFGPW

SEQ ID NO: 39681 - protein, 18 aa, Homo sapiens
CARHGLWIQPERGAFDIW

SEQ ID NO: 39682 - protein, 15 aa, Homo sapiens
CASALPWSQTHFDYW

SEQ ID NO: 39683 - protein, 17 aa, Homo sapiens
CAGGAGYSSGWTLFDYW

SEQ ID NO: 39684 - protein, 25 aa, Homo sapiens
CARNKAPNSGSYLFGYYYYYGMDVW

SEQ ID NO: 39685 - protein, 20 aa, Homo sapiens
CARVRRRIVASGPTWYFDLW

SEQ ID NO: 39686 - protein, 16 aa, Homo sapiens
CARDPGPFGELPFDYW

SEQ ID NO: 39687 - protein, 20 aa, Homo sapiens
CARQALYDFWSGHHNWFDPW

SEQ ID NO: 39688 - protein, 15 aa, Homo sapiens
CATSGSYWRPSFDYW

SEQ ID NO: 39689 - protein, 19 aa, Homo sapiens
CAKIRKIGDSSSWYGFDYW

SEQ ID NO: 39690 - protein, 12 aa, Homo sapiens
CQAWDNSAARVF

SEQ ID NO: 39691 - protein, 24 aa, Homo sapiens
CARSSYNSSWYAGNYNYYYYMDVW

SEQ ID NO: 39692 - protein, 17 aa, Homo sapiens
CARVRRYSDYLHAFNIW

SEQ ID NO: 39693 - protein, 23 aa, Homo sapiens
CARHWDHSSGWYGDGLVFWFDPW

SEQ ID NO: 39694 - protein, 18 aa, Homo sapiens
CARGIRYVWGSYRPFDYW

SEQ ID NO: 39695 - protein, 16 aa, Homo sapiens
CAKAGGWYERGSFDYW

SEQ ID NO: 39696 - protein, 27 aa, Homo sapiens
CARHVGTYYDFWSGYKSEPGQYYFDYW

SEQ ID NO: 39697 - protein, 15 aa, Homo sapiens
CARERPAVPTTLDYW

SEQ ID NO: 39698 - protein, 20 aa, Homo sapiens
CAKDRDYYYGLGTEDAFDMW

SEQ ID NO: 39699 - protein, 19 aa, Homo sapiens
CARSSLRDKTMDTDAFDIW

SEQ ID NO: 39700 - protein, 16 aa, Homo sapiens
CARGGDFPLIDFYDYW

SEQ ID NO: 39701 - protein, 26 aa, Homo sapiens
CAHRRGHGYYDYVWGSYRYPDAFDIW

SEQ ID NO: 39702 - protein, 24 aa, Homo sapiens
CARVKGNMLRAVSDYYYYYAMDIW

SEQ ID NO: 39703 - protein, 21 aa, Homo sapiens
CARHLTAMVRGVIREARFDPW

SEQ ID NO: 39704 - protein, 20 aa, Homo sapiens
CARGFYYGPSTFYYYYMDVW

SEQ ID NO: 39705 - protein, 25 aa, Homo sapiens
CARTSRIAVAGILFPHYYYYYMDVW

SEQ ID NO: 39706 - protein, 14 aa, Homo sapiens
CARQGHNIGWGDYW

SEQ ID NO: 39707 - protein, 20 aa, Homo sapiens
CARDRAAMLIFYYYYGMDVW

SEQ ID NO: 39708 - protein, 13 aa, Homo sapiens
CARTQNTAMSDYW

SEQ ID NO: 39709 - protein, 22 aa, Homo sapiens
CARRGRLSAYGSGSYQGWFDPW

SEQ ID NO: 39710 - protein, 24 aa, Homo sapiens
CARHIHLYDYVWGSYRYLRYFDYW

SEQ ID NO: 39711 - protein, 19 aa, Homo sapiens
CARRNYGTQASGDDAFDIW

SEQ ID NO: 39712 - protein, 18 aa, Homo sapiens
CATRGGSYFYGSAAFDYW

SEQ ID NO: 39713 - protein, 21 aa, Homo sapiens
CAKDVSITMIVVVITRVFDYW

SEQ ID NO: 39714 - protein, 19 aa, Homo sapiens
CSRQGIIGSDGYDIEFDYW

SEQ ID NO: 39715 - protein, 19 aa, Homo sapiens
CALSSWPKPYYYYYGMDVW

SEQ ID NO: 39716 - protein, 15 aa, Homo sapiens
CAGGWFGEATWFDPW

SEQ ID NO: 39717 - protein, 18 aa, Homo sapiens
CARSKRMVRGVMGYFDYW

SEQ ID NO: 39718 - protein, 21 aa, Homo sapiens
CARGFDYYGSGRYYIPDFDYW

SEQ ID NO: 39719 - protein, 17 aa, Homo sapiens
CVKDVGSPEIRILFDHW

SEQ ID NO: 39720 - protein, 15 aa, Homo sapiens
CAGWHWFGEWTNDYW

SEQ ID NO: 39721 - protein, 13 aa, Homo sapiens
CTAGYNSGYYVYW

SEQ ID NO: 39722 - protein, 17 aa, Homo sapiens
CAKSGYSYGEHREFDYW

SEQ ID NO: 39723 - protein, 21 aa, Homo sapiens
CARRKREWLVRKGTFGYFDYW

SEQ ID NO: 39724 - protein, 18 aa, Homo sapiens
CAKDRAAVAGRGDKDDYW

SEQ ID NO: 39725 - protein, 16 aa, Homo sapiens
CVTARGLGPFAYFDNW

SEQ ID NO: 39726 - protein, 18 aa, Homo sapiens
CARDQGSPVRGVGWFDPW

SEQ ID NO: 39727 - protein, 23 aa, Homo sapiens
CANGDKEYDFWRVIYYYYGMDVW

SEQ ID NO: 39728 - protein, 20 aa, Homo sapiens
CAKDGPPNSSSWYGGWFDPW

SEQ ID NO: 39729 - protein, 17 aa, Homo sapiens
CARHKTIFGMLDALDIW

SEQ ID NO: 39730 - protein, 15 aa, Homo sapiens
CARPVASLYDGVDVW

SEQ ID NO: 39731 - protein, 15 aa, Homo sapiens
CARDIGRYERAFDLW

SEQ ID NO: 39732 - protein, 13 aa, Homo sapiens
CAAFPYSNARDVW

SEQ ID NO: 39733 - protein, 15 aa, Homo sapiens
CARWVSSAFSWFDSW

SEQ ID NO: 39734 - protein, 14 aa, Homo sapiens
CARQGYQHGYLDYW

SEQ ID NO: 39735 - protein, 22 aa, Homo sapiens
CARDWKAAAMVDYYYYYGMDVW

SEQ ID NO: 39736 - protein, 15 aa, Homo sapiens
CARDRIYVWGIPDYW

SEQ ID NO: 39737 - protein, 15 aa, Homo sapiens
CARERDWLLNTFDYW

SEQ ID NO: 39738 - protein, 19 aa, Homo sapiens
CARIRKRSSSWSYWYFDLW

SEQ ID NO: 39739 - protein, 19 aa, Homo sapiens
CARPYGLGRYDNGGTFDIW

SEQ ID NO: 39740 - protein, 17 aa, Homo sapiens
CAKGIAVAGTTLPFDYW

SEQ ID NO: 39741 - protein, 15 aa, Homo sapiens
CARQMVRGVIGLDYW

SEQ ID NO: 39742 - protein, 18 aa, Homo sapiens
CTRHQTNYYGPGSPFDSW

SEQ ID NO: 39743 - protein, 16 aa, Homo sapiens
CARSYGDYRELPFDYW

SEQ ID NO: 39744 - protein, 23 aa, Homo sapiens
CARDYHPDYYDSSDYLHWYVDLW

SEQ ID NO: 39745 - protein, 26 aa, Homo sapiens
CARESGGYCSGGSCPLGRYYYYMDVW

SEQ ID NO: 39746 - protein, 16 aa, Homo sapiens
CARDVAAAGGFCFDPW

SEQ ID NO: 39747 - protein, 14 aa, Homo sapiens
CARRPPGYSAYDYW

SEQ ID NO: 39748 - protein, 19 aa, Homo sapiens
CAREPGLAVAGTSDYFAYW

SEQ ID NO: 39749 - protein, 19 aa, Homo sapiens
CAREAAAGPPHLNWYFDLW

SEQ ID NO: 39750 - protein, 18 aa, Homo sapiens
CARDSPFGVATSTNFDYW

SEQ ID NO: 39751 - protein, 17 aa, Homo sapiens
CARRYQSYGYKPHFDYW

SEQ ID NO: 39752 - protein, 17 aa, Homo sapiens
CAKDIAQLWSRWAFDIW

SEQ ID NO: 39753 - protein, 15 aa, Homo sapiens
CAREGDSGPENFDYW

SEQ ID NO: 39754 - protein, 16 aa, Homo sapiens
CAAKGSGSSRRYFDYW

SEQ ID NO: 39755 - protein, 20 aa, Homo sapiens
CARDTYYGPLGTISHYFDSW

SEQ ID NO: 39756 - protein, 21 aa, Homo sapiens
CARHLDYSYYYGSGSYLFDYW

SEQ ID NO: 39757 - protein, 18 aa, Homo sapiens
CARQKGHSSAWYNWFDPW

SEQ ID NO: 39758 - protein, 16 aa, Homo sapiens
CARDWCTSTGCYFDHW

SEQ ID NO: 39759 - protein, 17 aa, Homo sapiens
CARHAPVPLLREGFDYW

SEQ ID NO: 39760 - protein, 21 aa, Homo sapiens
CARDLLGITMVRGAYDAFDIW

SEQ ID NO: 39761 - protein, 12 aa, Homo sapiens
CQQFGHSPMCSF

SEQ ID NO: 39762 - protein, 21 aa, Homo sapiens
CATSLGYCSSMSCLEGYFDHW

SEQ ID NO: 39763 - protein, 16 aa, Homo sapiens
CAKDKFNAARRWFDYW

SEQ ID NO: 39764 - protein, 21 aa, Homo sapiens
CAKALSNQYYDILTGYYFDYW

SEQ ID NO: 39765 - protein, 24 aa, Homo sapiens
CARALGGPGYYYDSSGYYYLGDYW

SEQ ID NO: 39766 - protein, 10 aa, Homo sapiens
CTTHSYPDYW

SEQ ID NO: 39767 - protein, 14 aa, Homo sapiens
CARGSSGSYYRDFW

SEQ ID NO: 39768 - protein, 23 aa, Homo sapiens
CAHRKKRAGIAAAGYESGWFDPW

SEQ ID NO: 39769 - protein, 17 aa, Homo sapiens
CARGDATYPGTWYFDLW

SEQ ID NO: 39770 - protein, 14 aa, Homo sapiens
CVRGRSAPHVFDVW

SEQ ID NO: 39771 - protein, 22 aa, Homo sapiens
CARGRTYSSGWYLGARGAFDIW

SEQ ID NO: 39772 - protein, 16 aa, Homo sapiens
CARYSNSRYNNCFDPW

SEQ ID NO: 39773 - protein, 11 aa, Homo sapiens
CQQADSFPPAF

SEQ ID NO: 39774 - protein, 18 aa, Homo sapiens
CAKEGYDFWSGYYPFDYW

SEQ ID NO: 39775 - protein, 20 aa, Homo sapiens
CARDMIGLRFLEWNDAFDIW

SEQ ID NO: 39776 - protein, 18 aa, Homo sapiens
CAKDTGASWFGELLKDYW

SEQ ID NO: 39777 - protein, 16 aa, Homo sapiens
CAHAKLLWTQYYFDYW

SEQ ID NO: 39778 - protein, 17 aa, Homo sapiens
CARSYHYGSWKYALDIW

SEQ ID NO: 39779 - protein, 18 aa, Homo sapiens
CARGGEYYDILTGYFDYW

SEQ ID NO: 39780 - protein, 20 aa, Homo sapiens
CASHGDNWNDTGHYYYMDVW

SEQ ID NO: 39781 - protein, 18 aa, Homo sapiens
CARESSTVGIIVAAFDIW

SEQ ID NO: 39782 - protein, 17 aa, Homo sapiens
CARQPGITDDGEVHDYW

SEQ ID NO: 39783 - protein, 16 aa, Homo sapiens
CAREGPYSGEGVFDYW

SEQ ID NO: 39784 - protein, 21 aa, Homo sapiens
CARDLVEFGDYDITVGYMDVW

SEQ ID NO: 39785 - protein, 14 aa, Homo sapiens
CQSYDDRLSGSEVF

SEQ ID NO: 39786 - protein, 15 aa, Homo sapiens
CTTHGGNWLVTFDFW

SEQ ID NO: 39787 - protein, 15 aa, Homo sapiens
CARRGGYGAGYFDLW

SEQ ID NO: 39788 - protein, 17 aa, Homo sapiens
CARTSDNHGSSWDFDYW

SEQ ID NO: 39789 - protein, 11 aa, Homo sapiens
CHQFYTTPFTF

SEQ ID NO: 39790 - protein, 15 aa, Homo sapiens
CAKSAAAAIDAFDIW

SEQ ID NO: 39791 - protein, 17 aa, Homo sapiens
CATDLAEWELLSGFDYW

SEQ ID NO: 39792 - protein, 21 aa, Homo sapiens
CAKGRGLWIQLPDYYYYMDVW

SEQ ID NO: 39793 - protein, 13 aa, Homo sapiens
CAKEKIGLGFDYW

SEQ ID NO: 39794 - protein, 24 aa, Homo sapiens
CASFSATAAGTPLGYYYYYGMDVW

SEQ ID NO: 39795 - protein, 15 aa, Homo sapiens
CARVGAAADNWFDPW

SEQ ID NO: 39796 - protein, 14 aa, Homo sapiens
CAQSTTVTTLFDYW

SEQ ID NO: 39797 - protein, 16 aa, Homo sapiens
CVTAIVPTTPSAFDDW

SEQ ID NO: 39798 - protein, 11 aa, Homo sapiens
CAKGGPPFDYW

SEQ ID NO: 39799 - protein, 20 aa, Homo sapiens
CARDSGDQLWFGEQYNFDYW

SEQ ID NO: 39800 - protein, 15 aa, Homo sapiens
CARDSGDSGSWFDPW

SEQ ID NO: 39801 - protein, 15 aa, Homo sapiens
CASWYSSSSQLFDYW

SEQ ID NO: 39802 - protein, 15 aa, Homo sapiens
CARFDGSGSYAFDIW

SEQ ID NO: 39803 - protein, 17 aa, Homo sapiens
CAKDHSSADRGWYFDYW

SEQ ID NO: 39804 - protein, 18 aa, Homo sapiens
CARGLVGYSSGWSHFDPW

SEQ ID NO: 39805 - protein, 19 aa, Homo sapiens
CAVDGSGYYYDDFGYFDYW

SEQ ID NO: 39806 - protein, 16 aa, Homo sapiens
CARHYDSSGYGFFDYW

SEQ ID NO: 39807 - protein, 19 aa, Homo sapiens
CARDIFHSVPVAENAFDIW

SEQ ID NO: 39808 - protein, 23 aa, Homo sapiens
CAKDRGVRNSYSSSWSQYYFDSW

SEQ ID NO: 39809 - protein, 23 aa, Homo sapiens
CARDQYSSSWSQYYYYYYGMDVW

SEQ ID NO: 39810 - protein, 13 aa, Homo sapiens
CTAWDVSLNGVLF

SEQ ID NO: 39811 - protein, 15 aa, Homo sapiens
CAKDGTLVRGSLDYW

SEQ ID NO: 39812 - protein, 20 aa, Homo sapiens
CARDLAPSLVTMVRGPVDYW

SEQ ID NO: 39813 - protein, 17 aa, Homo sapiens
CAKDAFSYYGSDQFDYW

SEQ ID NO: 39814 - protein, 13 aa, Homo sapiens
CAAAASGNAFDIW

SEQ ID NO: 39815 - protein, 22 aa, Homo sapiens
CARQKTSHYYDRSGYEGEFDYW

SEQ ID NO: 39816 - protein, 13 aa, Homo sapiens
CARGWESRAFDIW

SEQ ID NO: 39817 - protein, 25 aa, Homo sapiens
CARSPRIERLLWFGVISKENAFDIW

SEQ ID NO: 39818 - protein, 19 aa, Homo sapiens
CARDSPLDGRTAAGTFGYW

SEQ ID NO: 39819 - protein, 23 aa, Homo sapiens
CARTRRGYRHGFEGDRTGPFDSW

SEQ ID NO: 39820 - protein, 23 aa, Homo sapiens
CARSRNYHGPGSQYNQYYYMDVW

SEQ ID NO: 39821 - protein, 18 aa, Homo sapiens
CARVGSGGFYYYYYMDVW

SEQ ID NO: 39822 - protein, 22 aa, Homo sapiens
CARGGGVATRPPYYYYYYMDVW

SEQ ID NO: 39823 - protein, 24 aa, Homo sapiens
CARDKPDGQYSSGWYYYYYYMDVW

SEQ ID NO: 39824 - protein, 18 aa, Homo sapiens
CARDRPRAGWPHNWLDPW

SEQ ID NO: 39825 - protein, 22 aa, Homo sapiens
CARDSLGGYDILTGYHRAFDVW

SEQ ID NO: 39826 - protein, 15 aa, Homo sapiens
CAKSSGIQGGAFDYW

SEQ ID NO: 39827 - protein, 15 aa, Homo sapiens
CAKDIGLAAGPFDYW

SEQ ID NO: 39828 - protein, 18 aa, Homo sapiens
CARRSIFRTVSYSYFDYW

SEQ ID NO: 39829 - protein, 14 aa, Homo sapiens
CARADRGSETFDYW

SEQ ID NO: 39830 - protein, 17 aa, Homo sapiens
CARLKSYGDQESPFDYW

SEQ ID NO: 39831 - protein, 15 aa, Homo sapiens
CAKDPGGSSWVLDYW

SEQ ID NO: 39832 - protein, 17 aa, Homo sapiens
CARDDSGYTYGYPVDYW

SEQ ID NO: 39833 - protein, 12 aa, Homo sapiens
CQQYYGYPPFSF

SEQ ID NO: 39834 - protein, 27 aa, Homo sapiens
CAKGHGGYDYVWGSYRYNYYYYYMDVW

SEQ ID NO: 39835 - protein, 17 aa, Homo sapiens
CAKGRITATGHDAFDIW

SEQ ID NO: 39836 - protein, 14 aa, Homo sapiens
CARIPARLVGVDYW

SEQ ID NO: 39837 - protein, 18 aa, Homo sapiens
CARCPVEPGVGLTHLDYW

SEQ ID NO: 39838 - protein, 25 aa, Homo sapiens
CAREGRYYDILTGPLSRKNLAFDIW

SEQ ID NO: 39839 - protein, 21 aa, Homo sapiens
CAGHYRGYTYGYGTSAWFDPW

SEQ ID NO: 39840 - protein, 22 aa, Homo sapiens
CAREGVGYSSGWTRLYRYFQHW

SEQ ID NO: 39841 - protein, 16 aa, Homo sapiens
CARDVAVARAWAMDVW

SEQ ID NO: 39842 - protein, 17 aa, Homo sapiens
CTRISSLWLASYYFDYW

SEQ ID NO: 39843 - protein, 13 aa, Homo sapiens
CQHRTNWPPMYAF

SEQ ID NO: 39844 - protein, 19 aa, Homo sapiens
CASLNIVETIMGWWYFDLW

SEQ ID NO: 39845 - protein, 18 aa, Homo sapiens
CARGTMVRGVTSEYFQHW

SEQ ID NO: 39846 - protein, 16 aa, Homo sapiens
CARTLDTAMAILFDYW

SEQ ID NO: 39847 - protein, 14 aa, Homo sapiens
CAKEIAVAGSFDYW

SEQ ID NO: 39848 - protein, 21 aa, Homo sapiens
CARDPEDVVGRVTAHDAFDIW

SEQ ID NO: 39849 - protein, 9 aa, Homo sapiens
CLQHDTFTF

SEQ ID NO: 39850 - protein, 16 aa, Homo sapiens
CAVTVAGTTLGTFDMW

SEQ ID NO: 39851 - protein, 19 aa, Homo sapiens
CARGDFWSALYYYYGMDVW

SEQ ID NO: 39852 - protein, 21 aa, Homo sapiens
CARGVDLRYFDWLYYYYMDVW

SEQ ID NO: 39853 - protein, 16 aa, Homo sapiens
CARDQGDYSSGWFDYW

SEQ ID NO: 39854 - protein, 17 aa, Homo sapiens
CAHNRRQGGYVNAFDIW

SEQ ID NO: 39855 - protein, 18 aa, Homo sapiens
CAKDSSLVGAPGGPFDIW

SEQ ID NO: 39856 - protein, 17 aa, Homo sapiens
CARHQPVGSGWYFFDNW

SEQ ID NO: 39857 - protein, 17 aa, Homo sapiens
CAKARRIAAADPAPDYW

SEQ ID NO: 39858 - protein, 27 aa, Homo sapiens
CAREKEGYYDILTGYYAGSSYSYIDVW

SEQ ID NO: 39859 - protein, 21 aa, Homo sapiens
CAKDPDYYYGSGSYQSYFDYW

SEQ ID NO: 39860 - protein, 20 aa, Homo sapiens
CARDHSSSWYRYYYYGMDVW

SEQ ID NO: 39861 - protein, 17 aa, Homo sapiens
CARLQIDGTTWGVFDIW

SEQ ID NO: 39862 - protein, 20 aa, Homo sapiens
CAREGTAQTTNKRNWFFDLW

SEQ ID NO: 39863 - protein, 20 aa, Homo sapiens
CARGANYYGSGSYYNWFDPW

SEQ ID NO: 39864 - protein, 15 aa, Homo sapiens
CARGWGSYRHAFDIW

SEQ ID NO: 39865 - protein, 16 aa, Homo sapiens
CTKAATSHGDNVGDYW

SEQ ID NO: 39866 - protein, 20 aa, Homo sapiens
CARASRSSMMIYFYYYMDVW

SEQ ID NO: 39867 - protein, 19 aa, Homo sapiens
CAKVRDSYGAADRLDFDYW

SEQ ID NO: 39868 - protein, 16 aa, Homo sapiens
CAKLAGREINDGFDIW

SEQ ID NO: 39869 - protein, 22 aa, Homo sapiens
CARDRSVGISTIRGTRGMADYW

SEQ ID NO: 39870 - protein, 18 aa, Homo sapiens
CARRGALGGNRGDAFDIW

SEQ ID NO: 39871 - protein, 14 aa, Homo sapiens
CTKGPILPQYFHHW

SEQ ID NO: 39872 - protein, 17 aa, Homo sapiens
CARTPFRGLSGYYLDYW

SEQ ID NO: 39873 - protein, 19 aa, Homo sapiens
CARRDLRGHDYGNDAFDVW

SEQ ID NO: 39874 - protein, 23 aa, Homo sapiens
CAKSPLQSMKWFGELLNYYFDYW

SEQ ID NO: 39875 - protein, 25 aa, Homo sapiens
CARDPVYGSGSHLGPPQPLYGFDIW

SEQ ID NO: 39876 - protein, 20 aa, Homo sapiens
CARGPLHHYGSGSYNWFDPW

SEQ ID NO: 39877 - protein, 21 aa, Homo sapiens
CAREDSYDILTGYYSRYFDYW

SEQ ID NO: 39878 - protein, 18 aa, Homo sapiens
CARRAYSSTWSPFFFDYW

SEQ ID NO: 39879 - protein, 20 aa, Homo sapiens
CARGQSAYSAGFFYYALDVW

SEQ ID NO: 39880 - protein, 14 aa, Homo sapiens
CARSAAAAPSFDYW

SEQ ID NO: 39881 - protein, 15 aa, Homo sapiens
CARVVAPETYYFDYW

SEQ ID NO: 39882 - protein, 18 aa, Homo sapiens
CARRGRQLGIQLWFEDYW

SEQ ID NO: 39883 - protein, 20 aa, Homo sapiens
CARDVPESYKWFGPRRFDFW

SEQ ID NO: 39884 - protein, 17 aa, Homo sapiens
CARRFPGGWHDGGFDYW

SEQ ID NO: 39885 - protein, 19 aa, Homo sapiens
CTKDYSSGWAGGLYYFDSW

SEQ ID NO: 39886 - protein, 18 aa, Homo sapiens
CAKAPLGQWLATEYIDYW

SEQ ID NO: 39887 - protein, 20 aa, Homo sapiens
CARHVPPRGGYSYGYGFDYW

SEQ ID NO: 39888 - protein, 13 aa, Homo sapiens
CYSTDRSGYHGMF

SEQ ID NO: 39889 - protein, 19 aa, Homo sapiens
CAKDMYINGWYNHVCFDSW

SEQ ID NO: 39890 - protein, 23 aa, Homo sapiens
CARDPFYESSGYYSGPQTTFDFW

SEQ ID NO: 39891 - protein, 26 aa, Homo sapiens
CARELGGLLRFLEWLPYYYYYGMDVW

SEQ ID NO: 39892 - protein, 23 aa, Homo sapiens
CAKVHSGLRVVVVAATDRHLDYW

SEQ ID NO: 39893 - protein, 16 aa, Homo sapiens
CAKERGILTGYYPDYW

SEQ ID NO: 39894 - protein, 20 aa, Homo sapiens
CARVDPLQGSAFDLSWFDPW

SEQ ID NO: 39895 - protein, 25 aa, Homo sapiens
CARQKRNRDEYGDYIIMSHDTFDIW

SEQ ID NO: 39896 - protein, 17 aa, Homo sapiens
CARDEDSSSWYENFDYW

SEQ ID NO: 39897 - protein, 21 aa, Homo sapiens
CARQETVSLGGRRRTTWFDPW

SEQ ID NO: 39898 - protein, 18 aa, Homo sapiens
CAREASYRTGLYRAFDMW

SEQ ID NO: 39899 - protein, 14 aa, Homo sapiens
CARRLRASVSFDYW

SEQ ID NO: 39900 - protein, 13 aa, Homo sapiens
CWGDDILTGSDYW

SEQ ID NO: 39901 - protein, 24 aa, Homo sapiens
CARGGSSLLWFGELLYPKIYFDYW

SEQ ID NO: 39902 - protein, 18 aa, Homo sapiens
CARIQNNIDSGADRQDYW

SEQ ID NO: 39903 - protein, 24 aa, Homo sapiens
CTTVSVIAVAGTLFPYYYYYMDVW

SEQ ID NO: 39904 - protein, 21 aa, Homo sapiens
CATARIIMVRGIIITDVFDMW

SEQ ID NO: 39905 - protein, 16 aa, Homo sapiens
CARPIEVADNDGFDLW

SEQ ID NO: 39906 - protein, 20 aa, Homo sapiens
CAIEHVIAAAGRTVDGMDVW

SEQ ID NO: 39907 - protein, 19 aa, Homo sapiens
CARDPYSTRWSYKGYFDVW

SEQ ID NO: 39908 - protein, 16 aa, Homo sapiens
CARVEVDSGDYFFDFW

SEQ ID NO: 39909 - protein, 17 aa, Homo sapiens
CARLSCSSTSCSVLDYW

SEQ ID NO: 39910 - protein, 29 aa, Homo sapiens
CARIAMTLGAYYDFWSGYQLTPDNWFDPW

SEQ ID NO: 39911 - protein, 12 aa, Homo sapiens
CAKRTTYYADYW

SEQ ID NO: 39912 - protein, 15 aa, Homo sapiens
CARGVWYSYGYFDFW

SEQ ID NO: 39913 - protein, 12 aa, Homo sapiens
CIQTLQTPPWTF

SEQ ID NO: 39914 - protein, 13 aa, Homo sapiens
CQSFDSINGDWVF

SEQ ID NO: 39915 - protein, 14 aa, Homo sapiens
CARGVGAATFFDNW

SEQ ID NO: 39916 - protein, 22 aa, Homo sapiens
CARDHLISRWLRLGTMNAFDIW

SEQ ID NO: 39917 - protein, 17 aa, Homo sapiens
CARGRIAVAAKYYFDYW

SEQ ID NO: 39918 - protein, 20 aa, Homo sapiens
CARSSLTGTAQTATDSPDVW

SEQ ID NO: 39919 - protein, 17 aa, Homo sapiens
CARDGLWFGSKGYMDVW

SEQ ID NO: 39920 - protein, 12 aa, Homo sapiens
CARVWHGDFDSW

SEQ ID NO: 39921 - protein, 16 aa, Homo sapiens
CARLPAAAGQSPFDFW

SEQ ID NO: 39922 - protein, 16 aa, Homo sapiens
CAKDKGGRIRGYFDYW

SEQ ID NO: 39923 - protein, 24 aa, Homo sapiens
CARDGTWDIFCSGGACYDYFFDYW

SEQ ID NO: 39924 - protein, 21 aa, Homo sapiens
CARGGPPAELLWFGANAFDIW

SEQ ID NO: 39925 - protein, 17 aa, Homo sapiens
CGGVRHEQGSGWYHDYW

SEQ ID NO: 39926 - protein, 14 aa, Homo sapiens
CAKDLVVVAATDYW

SEQ ID NO: 39927 - protein, 22 aa, Homo sapiens
CARTPGYCSGGRCYSGDYFDFW

SEQ ID NO: 39928 - protein, 11 aa, Homo sapiens
CMQGVHLPPVF

SEQ ID NO: 39929 - protein, 18 aa, Homo sapiens
CAKDPRTTIDSGLYFHYW

SEQ ID NO: 39930 - protein, 16 aa, Homo sapiens
CVTGSVVASVGYFDLW

SEQ ID NO: 39931 - protein, 18 aa, Homo sapiens
CQSYDSSLSSLSGSRVVF

SEQ ID NO: 39932 - protein, 15 aa, Homo sapiens
CARARTQQLGLFDIW

SEQ ID NO: 39933 - protein, 20 aa, Homo sapiens
CARRGHYYNSGRYTTPFDYW

SEQ ID NO: 39934 - protein, 16 aa, Homo sapiens
CASVFSGYDYRAFDMW

SEQ ID NO: 39935 - protein, 19 aa, Homo sapiens
CARLGLYDDLTGYYLFDYW

SEQ ID NO: 39936 - protein, 20 aa, Homo sapiens
CARSPTTLYSSGWYDWFDPW

SEQ ID NO: 39937 - protein, 14 aa, Homo sapiens
CASYGDYVDVADYW

SEQ ID NO: 39938 - protein, 18 aa, Homo sapiens
CARDMYSSNSKPDFHDYW

SEQ ID NO: 39939 - protein, 24 aa, Homo sapiens
CARTGYVAVAGYLLPYYQYYMDVW

SEQ ID NO: 39940 - protein, 15 aa, Homo sapiens
CTTDHDYGDYLLDYW

SEQ ID NO: 39941 - protein, 21 aa, Homo sapiens
CARDVRLLWFGEGLMGAFDIW

SEQ ID NO: 39942 - protein, 16 aa, Homo sapiens
CVRLFEYNGSFFFDYW

SEQ ID NO: 39943 - protein, 16 aa, Homo sapiens
CARLSANSWFGWFDPW

SEQ ID NO: 39944 - protein, 13 aa, Homo sapiens
CARVISEDGFDIW

SEQ ID NO: 39945 - protein, 16 aa, Homo sapiens
CAAMDKDLMRGAFDYW

SEQ ID NO: 39946 - protein, 16 aa, Homo sapiens
CAKDGTSIAAADLDYW

SEQ ID NO: 39947 - protein, 21 aa, Homo sapiens
CARHGGERFLSSYYYYGMDVW

SEQ ID NO: 39948 - protein, 15 aa, Homo sapiens
CASSCGGSCKLGDYW

SEQ ID NO: 39949 - protein, 19 aa, Homo sapiens
CARSRPNYDLRPYWYFDLW

SEQ ID NO: 39950 - protein, 20 aa, Homo sapiens
CARHEELLWFGTYYYYMDVW

SEQ ID NO: 39951 - protein, 21 aa, Homo sapiens
CVKDFHPDPTAYYHYYAMDVW

SEQ ID NO: 39952 - protein, 18 aa, Homo sapiens
CATFRLSSFERREAFDVW

SEQ ID NO: 39953 - protein, 18 aa, Homo sapiens
CARDGMITFGGVIVKDYW

SEQ ID NO: 39954 - protein, 17 aa, Homo sapiens
CAHRRSLWFGKYYFDYW

SEQ ID NO: 39955 - protein, 17 aa, Homo sapiens
CAILAAMGYYYYYMDVW

SEQ ID NO: 39956 - protein, 16 aa, Homo sapiens
CARGRWIQLWLHLDYW

SEQ ID NO: 39957 - protein, 17 aa, Homo sapiens
CAKSRHEFSSSDYFDYW

SEQ ID NO: 39958 - protein, 15 aa, Homo sapiens
CARDSSDNWGQFDYW

SEQ ID NO: 39959 - protein, 19 aa, Homo sapiens
CAKSVGVGSGWYFHAFDIW

SEQ ID NO: 39960 - protein, 14 aa, Homo sapiens
CARVLWGSDAFDFW

SEQ ID NO: 39961 - protein, 17 aa, Homo sapiens
CARDLGSGSYMNREDYW

SEQ ID NO: 39962 - protein, 18 aa, Homo sapiens
CARGLLGGSGYSNAFDIW

SEQ ID NO: 39963 - protein, 19 aa, Homo sapiens
CAKWSGYGIVSYGYYFDYW

SEQ ID NO: 39964 - protein, 18 aa, Homo sapiens
CAKAVAGTETTTDAFDIW

SEQ ID NO: 39965 - protein, 20 aa, Homo sapiens
CAREERYFHWESRSNWFDPW

SEQ ID NO: 39966 - protein, 22 aa, Homo sapiens
CARDPSDNILTAYFLNDSFDIW

SEQ ID NO: 39967 - protein, 21 aa, Homo sapiens
CARDPFTSSASYYHSYGMDVW

SEQ ID NO: 39968 - protein, 13 aa, Homo sapiens
CSAWDSSLRSQVF

SEQ ID NO: 39969 - protein, 14 aa, Homo sapiens
CARDLDVAGAFDIW

SEQ ID NO: 39970 - protein, 25 aa, Homo sapiens
CARGHARPTLITLVRGVIISPLDYW

SEQ ID NO: 39971 - protein, 26 aa, Homo sapiens
CARMPQVRGVISFLPTEGDYHYMDVW

SEQ ID NO: 39972 - protein, 20 aa, Homo sapiens
CAKDSSSDIVMTPAAPLDYW

SEQ ID NO: 39973 - protein, 22 aa, Homo sapiens
CARDTVQLGEQTLYFLLPLDYW

SEQ ID NO: 39974 - protein, 13 aa, Homo sapiens
CARCGLEPRVDYW

SEQ ID NO: 39975 - protein, 20 aa, Homo sapiens
CARLRDGWLLTQTHYYFDYW

SEQ ID NO: 39976 - protein, 14 aa, Homo sapiens
CAAERRLDQYFQDW

SEQ ID NO: 39977 - protein, 16 aa, Homo sapiens
CARDRLTGYQDAFDIW

SEQ ID NO: 39978 - protein, 20 aa, Homo sapiens
CARLASAAGMPVAAKHEDYW

SEQ ID NO: 39979 - protein, 17 aa, Homo sapiens
CARLPFWSGYLDVFDIW

SEQ ID NO: 39980 - protein, 20 aa, Homo sapiens
CASTAPGTTNSDYYYGMDVW

SEQ ID NO: 39981 - protein, 16 aa, Homo sapiens
CASQYSSSYYYGMDVW

SEQ ID NO: 39982 - protein, 13 aa, Homo sapiens
CARGSITMNFDYW

SEQ ID NO: 39983 - protein, 16 aa, Homo sapiens
CAKAARGGYSWYFDLW

SEQ ID NO: 39984 - protein, 24 aa, Homo sapiens
CARSVNSAGSYYDILTGYDAFDIW

SEQ ID NO: 39985 - protein, 16 aa, Homo sapiens
CARETLTVTTSEFDYW

SEQ ID NO: 39986 - protein, 21 aa, Homo sapiens
CAHSRYTRGYSYGFPYYFDYW

SEQ ID NO: 39987 - protein, 18 aa, Homo sapiens
CTRRYYHDTSGNYQSDYW

SEQ ID NO: 39988 - protein, 24 aa, Homo sapiens
CTRDSPLAYCRSSDCYTSHTFDIW

SEQ ID NO: 39989 - protein, 19 aa, Homo sapiens
CAKTAGTSPGLWSSCFDYW

SEQ ID NO: 39990 - protein, 24 aa, Homo sapiens
CARGVGLRGYYDSLWGSFRYMDFW

SEQ ID NO: 39991 - protein, 22 aa, Homo sapiens
CSRDFPRGYSGFDYRPGAFDIW

SEQ ID NO: 39992 - protein, 19 aa, Homo sapiens
CARDKWREVVVAAGRTDYW

SEQ ID NO: 39993 - protein, 17 aa, Homo sapiens
CARATPSGPYPKPFDYW

SEQ ID NO: 39994 - protein, 21 aa, Homo sapiens
CAKSFSETTFSKQMNDAIDVW

SEQ ID NO: 39995 - protein, 21 aa, Homo sapiens
CAHIVVVPVAIEFLSWYFDLW

SEQ ID NO: 39996 - protein, 20 aa, Homo sapiens
CAREPGGYMVRETSDAFDIW

SEQ ID NO: 39997 - protein, 19 aa, Homo sapiens
CAREQRGYSSRSFYYFDYW

SEQ ID NO: 39998 - protein, 15 aa, Homo sapiens
CAKDNTAMVDWFDPW

SEQ ID NO: 39999 - protein, 21 aa, Homo sapiens
CVRGVRNSYDRTGYLRYFDYW

SEQ ID NO: 40000 - protein, 15 aa, Homo sapiens
CASRPNTAAFYFDYW

SEQ ID NO: 40001 - protein, 18 aa, Homo sapiens
CAKSYSVLGLVMSIFDSW

SEQ ID NO: 40002 - protein, 20 aa, Homo sapiens
CARSGVRYSYETRGYFFDSW

SEQ ID NO: 40003 - protein, 23 aa, Homo sapiens
CARDLAPKYSSGWTYYYYGMDVW

SEQ ID NO: 40004 - protein, 21 aa, Homo sapiens
CACGVGTYDFWSGYRRYFDYW

SEQ ID NO: 40005 - protein, 19 aa, Homo sapiens
CARGRGYSGYGDSAPLDYW

SEQ ID NO: 40006 - protein, 22 aa, Homo sapiens
CARGTYDSSGYYYWADSGFDYW

SEQ ID NO: 40007 - protein, 23 aa, Homo sapiens
CARDAPARYYGSGSYYPNAFDIW

SEQ ID NO: 40008 - protein, 26 aa, Homo sapiens
CARHEGYCSGGSCYSMPPYYYYMDVW

SEQ ID NO: 40009 - protein, 15 aa, Homo sapiens
CAGSWYSSSWGFDYW

SEQ ID NO: 40010 - protein, 17 aa, Homo sapiens
CARDMEQQWLPDAFDIW

SEQ ID NO: 40011 - protein, 14 aa, Homo sapiens
CARHPLTGTRFDYW

SEQ ID NO: 40012 - protein, 18 aa, Homo sapiens
CATTPGYSSSWYGFFDYW

SEQ ID NO: 40013 - protein, 17 aa, Homo sapiens
CARALPVDTAMVGLDYW

SEQ ID NO: 40014 - protein, 20 aa, Homo sapiens
CARDPDDYGDYAPFDAFDIW

SEQ ID NO: 40015 - protein, 19 aa, Homo sapiens
CASRLRGGQWLVNDYFDNW

SEQ ID NO: 40016 - protein, 27 aa, Homo sapiens
CAKGEGYCSSTSCYGIGYYYYYGMDVW

SEQ ID NO: 40017 - protein, 17 aa, Homo sapiens
CARVPEMDSYGFILDYW

SEQ ID NO: 40018 - protein, 15 aa, Homo sapiens
CARDGCGGDCELDYW

SEQ ID NO: 40019 - protein, 22 aa, Homo sapiens
CAKKVSSGYDLYMHYFYALDVW

SEQ ID NO: 40020 - protein, 15 aa, Homo sapiens
CARDRWFEENHFDFW

SEQ ID NO: 40021 - protein, 11 aa, Homo sapiens
CMQPLETPYNF

SEQ ID NO: 40022 - protein, 17 aa, Homo sapiens
CARGRATGYSSSCFGYW

SEQ ID NO: 40023 - protein, 17 aa, Homo sapiens
CAKDMGFSRSGDAFDIW

SEQ ID NO: 40024 - protein, 22 aa, Homo sapiens
CARVEVITFGGVIVSPSYFDYW

SEQ ID NO: 40025 - protein, 21 aa, Homo sapiens
CARDIIVVPAANREENWFDPW

SEQ ID NO: 40026 - protein, 16 aa, Homo sapiens
CAKEAGGQQLVVLDYW

SEQ ID NO: 40027 - protein, 20 aa, Homo sapiens
CARDKSWWYSSGWGDAFDIW

SEQ ID NO: 40028 - protein, 15 aa, Homo sapiens
CARRTNSGYEEFDYW

SEQ ID NO: 40029 - protein, 19 aa, Homo sapiens
CTRDGGHYGSDSYYGLDYW

SEQ ID NO: 40030 - protein, 16 aa, Homo sapiens
CTQSGYSGYDDAFDIW

SEQ ID NO: 40031 - protein, 24 aa, Homo sapiens
CARDQLGYCSSTSCSDYYYGMDVW

SEQ ID NO: 40032 - protein, 20 aa, Homo sapiens
CAKDIYAGATRRVGGGPDYW

SEQ ID NO: 40033 - protein, 18 aa, Homo sapiens
CARDRSRQQQLVPYFDQW

SEQ ID NO: 40034 - protein, 24 aa, Homo sapiens
CARSAPQITMIVVVMYYYYGMDVW

SEQ ID NO: 40035 - protein, 26 aa, Homo sapiens
CLRSEDTAVYYCARVWGTVTTYLDYW

SEQ ID NO: 40036 - protein, 14 aa, Homo sapiens
CARADMIFGVSDYW

SEQ ID NO: 40037 - protein, 20 aa, Homo sapiens
CATLCGGDCYDYYYYGMDVW

SEQ ID NO: 40038 - protein, 19 aa, Homo sapiens
CAKVSDRGSSYYYYFMDVW

SEQ ID NO: 40039 - protein, 20 aa, Homo sapiens
CARAVDYYGSKIFYQAYDYW

SEQ ID NO: 40040 - protein, 16 aa, Homo sapiens
CARALVTGWPNTFDVW

SEQ ID NO: 40041 - protein, 18 aa, Homo sapiens
CARPGGGYSYGWGAFDIW

SEQ ID NO: 40042 - protein, 22 aa, Homo sapiens
CARTPYYYDSSGYDYYFWFDYW

SEQ ID NO: 40043 - protein, 14 aa, Homo sapiens
CARATTSTYYFDAW

SEQ ID NO: 40044 - protein, 18 aa, Homo sapiens
CAKDPFSGVVAASYFDYW

SEQ ID NO: 40045 - protein, 23 aa, Homo sapiens
CARGAWDIVVVVAATLGSAFDIW

SEQ ID NO: 40046 - protein, 19 aa, Homo sapiens
CARHFYCSGGSCFSHVDYW

SEQ ID NO: 40047 - protein, 17 aa, Homo sapiens
CARDLRKYYYAAGGDYW

SEQ ID NO: 40048 - protein, 14 aa, Homo sapiens
CAREVSLTVYFDLW

SEQ ID NO: 40049 - protein, 24 aa, Homo sapiens
CARDGAAFCDGDCFPEKTAGFDCW

SEQ ID NO: 40050 - protein, 24 aa, Homo sapiens
CARDRGYCSGGSCLYYYYYGMDVW

SEQ ID NO: 40051 - protein, 25 aa, Homo sapiens
CARGRTIRGYSAHILGAYYYGMDVW

SEQ ID NO: 40052 - protein, 17 aa, Homo sapiens
CARDKTGYRGPRWFDPW

SEQ ID NO: 40053 - protein, 14 aa, Homo sapiens
CTHPSMVRGGFDYW

SEQ ID NO: 40054 - protein, 14 aa, Homo sapiens
CARGLTMVTRDDYW

SEQ ID NO: 40055 - protein, 23 aa, Homo sapiens
CARVRYYDSSGSALSHDWYFDLW

SEQ ID NO: 40056 - protein, 14 aa, Homo sapiens
CARIVATVTALDYW

SEQ ID NO: 40057 - protein, 13 aa, Homo sapiens
CQQYFEWPPAYTF

SEQ ID NO: 40058 - protein, 16 aa, Homo sapiens
CASSPSYGDYVWFDPW

SEQ ID NO: 40059 - protein, 16 aa, Homo sapiens
CARPGDYGDLFPFDYW

SEQ ID NO: 40060 - protein, 26 aa, Homo sapiens
CALPISAVYYCARDGPRIAAAGCDYW

SEQ ID NO: 40061 - protein, 20 aa, Homo sapiens
CARGRRVAVAGEKTYYFDYW

SEQ ID NO: 40062 - protein, 14 aa, Homo sapiens
CVRRRVELRAFDMW

SEQ ID NO: 40063 - protein, 19 aa, Homo sapiens
CAKDIQAQRYSSSWYLDYW

SEQ ID NO: 40064 - protein, 16 aa, Homo sapiens
CARAAYSYNREYFDSW

SEQ ID NO: 40065 - protein, 15 aa, Homo sapiens
CARRRGVAKNVIDYW

SEQ ID NO: 40066 - protein, 11 aa, Homo sapiens
CMQATDWPRAF

SEQ ID NO: 40067 - protein, 19 aa, Homo sapiens
CVKDVRAGWLSQDDAFDIW

SEQ ID NO: 40068 - protein, 13 aa, Homo sapiens
CQSFDSSLKEVIF

SEQ ID NO: 40069 - protein, 18 aa, Homo sapiens
CAKDYFYDSVQGCYFNYW

SEQ ID NO: 40070 - protein, 16 aa, Homo sapiens
CAKGRGYSYGYGLDYW

SEQ ID NO: 40071 - protein, 30 aa, Homo sapiens
CARAYTPRLFPDMITFGGVIVKGGDAFDIW

SEQ ID NO: 40072 - protein, 25 aa, Homo sapiens
CARGLPYNMVRGVPRRYYYYGMDVW

SEQ ID NO: 40073 - protein, 24 aa, Homo sapiens
CARAPPLETLLWFGVGDGYAFDIW

SEQ ID NO: 40074 - protein, 13 aa, Homo sapiens
CARVHGAQAFDYW

SEQ ID NO: 40075 - protein, 16 aa, Homo sapiens
CAKDRYTITMVRGDYW

SEQ ID NO: 40076 - protein, 15 aa, Homo sapiens
CAHGIESDLYYFDNW

SEQ ID NO: 40077 - protein, 16 aa, Homo sapiens
CAKSQGGSYYSYFDYW

SEQ ID NO: 40078 - protein, 20 aa, Homo sapiens
CATDQRDFGELLLGDYFDYW

SEQ ID NO: 40079 - protein, 19 aa, Homo sapiens
CARVSVVPGSRGLYYFDFW

SEQ ID NO: 40080 - protein, 22 aa, Homo sapiens
CARALGGLLWFGEQSKYYFDYW

SEQ ID NO: 40081 - protein, 23 aa, Homo sapiens
CAKDIRYCSGGSCYSAFGMFDYW

SEQ ID NO: 40082 - protein, 11 aa, Homo sapiens
CARSDYGFDFW

SEQ ID NO: 40083 - protein, 19 aa, Homo sapiens
CARDLSPYVTPYVDAFDVW

SEQ ID NO: 40084 - protein, 16 aa, Homo sapiens
CGRGNRAEPLGEIDYW

SEQ ID NO: 40085 - protein, 18 aa, Homo sapiens
CATSVLRYFDWLPEIDYW

SEQ ID NO: 40086 - protein, 19 aa, Homo sapiens
CAKAPPSVRGLICPSFDSW

SEQ ID NO: 40087 - protein, 17 aa, Homo sapiens
CARDYGGNPRNWYFDLW

SEQ ID NO: 40088 - protein, 13 aa, Homo sapiens
CTRSSKSYYFDFW

SEQ ID NO: 40089 - protein, 17 aa, Homo sapiens
CARDLGIAVAQRAFDYW

SEQ ID NO: 40090 - protein, 21 aa, Homo sapiens
CARFHLNYDVVTGHYAYCDYW

SEQ ID NO: 40091 - protein, 18 aa, Homo sapiens
CARGYFDWLSPFDAFDIW

SEQ ID NO: 40092 - protein, 25 aa, Homo sapiens
CARDVVHYGSGSWPGYYYYYYMDVW

SEQ ID NO: 40093 - protein, 14 aa, Homo sapiens
CGHRLTSSSCFDYW

SEQ ID NO: 40094 - protein, 19 aa, Homo sapiens
CAKKIRFGELSSEDAFDIW

SEQ ID NO: 40095 - protein, 23 aa, Homo sapiens
CARRGMGDYDILTGFISTAFDIW

SEQ ID NO: 40096 - protein, 18 aa, Homo sapiens
CAKDVIWGIAGTKNFDYW

SEQ ID NO: 40097 - protein, 21 aa, Homo sapiens
CAREARELQFLEWLVPHFDSW

SEQ ID NO: 40098 - protein, 16 aa, Homo sapiens
CATNPPAARTPRFDYW

SEQ ID NO: 40099 - protein, 12 aa, Homo sapiens
CLQHDNLPQGTF

SEQ ID NO: 40100 - protein, 23 aa, Homo sapiens
CARHLHMGYDDSSDYHISLFDYW

SEQ ID NO: 40101 - protein, 18 aa, Homo sapiens
CARDPRFRAAAGPDFDYW

SEQ ID NO: 40102 - protein, 12 aa, Homo sapiens
CSGGETPLFDVW

SEQ ID NO: 40103 - protein, 15 aa, Homo sapiens
CAREEAEMATIIDYW

SEQ ID NO: 40104 - protein, 16 aa, Homo sapiens
CARLGLLWFGETFDYW

SEQ ID NO: 40105 - protein, 22 aa, Homo sapiens
CATELYCTKGVCPLLGYAMDVW

SEQ ID NO: 40106 - protein, 18 aa, Homo sapiens
CARDGFSADISYNWFSPW

SEQ ID NO: 40107 - protein, 18 aa, Homo sapiens
CARTILTGYYTEYYFDYW

SEQ ID NO: 40108 - protein, 20 aa, Homo sapiens
CARQGYSSGWYFPLRAFDIW

SEQ ID NO: 40109 - protein, 20 aa, Homo sapiens
CARHRTAMAWVGYYYGMDVW

SEQ ID NO: 40110 - protein, 16 aa, Homo sapiens
CARPGTVDTAMAFDYW

SEQ ID NO: 40111 - protein, 25 aa, Homo sapiens
CARDARGIQLWDPPSVVTIEYFQHW

SEQ ID NO: 40112 - protein, 20 aa, Homo sapiens
CARVVRGVIIGSLDYYMDVW

SEQ ID NO: 40113 - protein, 14 aa, Homo sapiens
CAGTHHGLGSPDYW

SEQ ID NO: 40114 - protein, 14 aa, Homo sapiens
CASSLNWNGLFDYW

SEQ ID NO: 40115 - protein, 14 aa, Homo sapiens
CARPLLPIGYFDLW

SEQ ID NO: 40116 - protein, 20 aa, Homo sapiens
CTTGQPTKNLFYYYYYMDVW

SEQ ID NO: 40117 - protein, 15 aa, Homo sapiens
CARRSLATSGCFDYW

SEQ ID NO: 40118 - protein, 16 aa, Homo sapiens
CARFFYGDYDRWFDPW

SEQ ID NO: 40119 - protein, 17 aa, Homo sapiens
CARVRGTEYRVQTFDIW

SEQ ID NO: 40120 - protein, 18 aa, Homo sapiens
CARSARQWLANYYYFDYW

SEQ ID NO: 40121 - protein, 16 aa, Homo sapiens
CATSSLRWGPDAFDLW

SEQ ID NO: 40122 - protein, 19 aa, Homo sapiens
CARDPTNCSGGSCFPGDYW

SEQ ID NO: 40123 - protein, 22 aa, Homo sapiens
CARVNYYEYVWGSYRYTNFDYW

SEQ ID NO: 40124 - protein, 20 aa, Homo sapiens
CATPRPTREYNSGHDVYDIW

SEQ ID NO: 40125 - protein, 18 aa, Homo sapiens
CARLNYDILTGYVFFQYW

SEQ ID NO: 40126 - protein, 20 aa, Homo sapiens
CARGLIVATIFHYYYYMDVW

SEQ ID NO: 40127 - protein, 23 aa, Homo sapiens
CAREVGYYDFWSGSNTLGWFDPW

SEQ ID NO: 40128 - protein, 18 aa, Homo sapiens
CVKDWAYGEMKSYYFDYW

SEQ ID NO: 40129 - protein, 17 aa, Homo sapiens
CAHRPGPSRRLGAFDIW

SEQ ID NO: 40130 - protein, 19 aa, Homo sapiens
CARDIRSSWSQKFNWFDPW

SEQ ID NO: 40131 - protein, 16 aa, Homo sapiens
CARHATADILNWFDSW

SEQ ID NO: 40132 - protein, 20 aa, Homo sapiens
CVKDITSIVVVPAATPFEYW

SEQ ID NO: 40133 - protein, 20 aa, Homo sapiens
CARRNCSGGTCYKKGAFDVW

SEQ ID NO: 40134 - protein, 21 aa, Homo sapiens
CARATYCSSTSCPPFRAFDIW

SEQ ID NO: 40135 - protein, 16 aa, Homo sapiens
CARGRWRSSSSQADYW

SEQ ID NO: 40136 - protein, 19 aa, Homo sapiens
CARGSVAAAGTRAPWFDPW

SEQ ID NO: 40137 - protein, 16 aa, Homo sapiens
CARVNGVNTSPSFDYW

SEQ ID NO: 40138 - protein, 12 aa, Homo sapiens [sequence omitted]

SEQ ID NO: 40139 - protein, 23 aa, Homo sapiens
CARLPPGYSSSWHRIHRGYFDYW

SEQ ID NO: 40140 - protein, 17 aa, Homo sapiens
CARKPPYSSNLYFFDYW

SEQ ID NO: 40141 - protein, 13 aa, Homo sapiens
CTRWRVHSIFDYW

SEQ ID NO: 40142 - protein, 11 aa, Homo sapiens
CARAWKGLDYW

SEQ ID NO: 40143 - protein, 15 aa, Homo sapiens
CARGEHYGNYVLDYW

SEQ ID NO: 40144 - protein, 17 aa, Homo sapiens
CARMVRGVFHRDAFDIW

SEQ ID NO: 40145 - protein, 13 aa, Homo sapiens
CQSADTSATYRLF

SEQ ID NO: 40146 - protein, 12 aa, Homo sapiens
CAVDADGYNYYW

SEQ ID NO: 40147 - protein, 17 aa, Homo sapiens
CARDRRVSATTHFFDYW

SEQ ID NO: 40148 - protein, 16 aa, Homo sapiens
CARDPDGYSSGWFFYW

SEQ ID NO: 40149 - protein, 17 aa, Homo sapiens
CARVNSGYVADDSFDIW

SEQ ID NO: 40150 - protein, 21 aa, Homo sapiens
CARGSGDTRGYTYGYDAFDIW

SEQ ID NO: 40151 - protein, 20 aa, Homo sapiens
CARAECSGGSCYSWGYFDYW

SEQ ID NO: 40152 - protein, 20 aa, Homo sapiens
CARGHTIFGVVTPPDAFDIW

SEQ ID NO: 40153 - protein, 20 aa, Homo sapiens
CTRGGILASSYSSRTAFDFW

SEQ ID NO: 40154 - protein, 19 aa, Homo sapiens
CARDHGYSGYDSEPESDYW

SEQ ID NO: 40155 - protein, 17 aa, Homo sapiens
CARTTVTPVGWASFDVW

SEQ ID NO: 40156 - protein, 16 aa, Homo sapiens
CTKDFRSSTWNYFDLW

SEQ ID NO: 40157 - protein, 17 aa, Homo sapiens
CAKDPRPYSGYDYFDFW

SEQ ID NO: 40158 - protein, 21 aa, Homo sapiens
CAHRRPGGFVNGFYGDYFDYW

SEQ ID NO: 40159 - protein, 23 aa, Homo sapiens
CARRSRGSNIVLMVYAHSGVDYW

SEQ ID NO: 40160 - protein, 17 aa, Homo sapiens
CARDYGDSRGVYFFDYW

SEQ ID NO: 40161 - protein, 15 aa, Homo sapiens
CARTLHYTTSCFDSW

SEQ ID NO: 40162 - protein, 23 aa, Homo sapiens
CASSDGVLAVGSFGYYYYYMDVW

SEQ ID NO: 40163 - protein, 15 aa, Homo sapiens
CARELPNESDVFDIW

SEQ ID NO: 40164 - protein, 17 aa, Homo sapiens
CARTARGVIVKADFDIW

SEQ ID NO: 40165 - protein, 19 aa, Homo sapiens
CARKIRGVIIRGYNWFDPW

SEQ ID NO: 40166 - protein, 18 aa, Homo sapiens
CARDGGIQLRFMYYFDSW

SEQ ID NO: 40167 - protein, 24 aa, Homo sapiens
CARGHPILDGLTMIDYYYYGMDVW

SEQ ID NO: 40168 - protein, 21 aa, Homo sapiens
CAHSSTTMVRGVIPARLFDYW

SEQ ID NO: 40169 - protein, 15 aa, Homo sapiens
CAHGSSSGCWYFDYW

SEQ ID NO: 40170 - protein, 25 aa, Homo sapiens
CARDRTGYDFWSGYSPFQPGEFDYW

SEQ ID NO: 40171 - protein, 13 aa, Homo sapiens
CARETTTANFDYW

SEQ ID NO: 40172 - protein, 16 aa, Homo sapiens
CARLKHGYSYALIDYW

SEQ ID NO: 40173 - protein, 29 aa, Homo sapiens
CAKASSSEYNTGWYSQSLSIDEEYYFDYW

SEQ ID NO: 40174 - protein, 17 aa, Homo sapiens
CARVKGWYPVDWYFDLW

SEQ ID NO: 40175 - protein, 17 aa, Homo sapiens
CARLYYGWGMENWFDPW

SEQ ID NO: 40176 - protein, 11 aa, Homo sapiens [sequence omitted]

SEQ ID NO: 40177 - protein, 14 aa, Homo sapiens
CARSYTRGDYDHYW

SEQ ID NO: 40178 - protein, 20 aa, Homo sapiens
CAKDFREIGVGGYSFGFDYW

SEQ ID NO: 40179 - protein, 15 aa, Homo sapiens
CAKDMASSGWYLEYW

SEQ ID NO: 40180 - protein, 17 aa, Homo sapiens
CAKDRDNYYGSGSHDYW

SEQ ID NO: 40181 - protein, 16 aa, Homo sapiens
CAHRLPVAGSHIFDYW

SEQ ID NO: 40182 - protein, 21 aa, Homo sapiens
CANKGGLYYYDSSGSYYFDYW

SEQ ID NO: 40183 - protein, 14 aa, Homo sapiens
CARTQHSYGPFDYW

SEQ ID NO: 40184 - protein, 14 aa, Homo sapiens
CARDIGTSHCFDYW

SEQ ID NO: 40185 - protein, 19 aa, Homo sapiens
CAKDRVGSSWYEGNWFDPW

SEQ ID NO: 40186 - protein, 21 aa, Homo sapiens
CARLKAGAILLIAVAGPLDYW

SEQ ID NO: 40187 - protein, 20 aa, Homo sapiens
CASDGYSSGWNSGGGAFDIW

SEQ ID NO: 40188 - protein, 16 aa, Homo sapiens
CAKDISSGSGWPIDYW

SEQ ID NO: 40189 - protein, 21 aa, Homo sapiens
CVTYFYYDSSPNYRGIASDIW

SEQ ID NO: 40190 - protein, 17 aa, Homo sapiens
CTTDLPADSSSWKIDYW

SEQ ID NO: 40191 - protein, 23 aa, Homo sapiens
CARHVSYWDYDILTGYYRAFDIW

SEQ ID NO: 40192 - protein, 20 aa, Homo sapiens
CTRRNSYWTHIAADYWFDPW

SEQ ID NO: 40193 - protein, 21 aa, Homo sapiens
CARDPGMTTVHNHYYYGMDVW

SEQ ID NO: 40194 - protein, 21 aa, Homo sapiens
CARDQHQSISGKLKYNYFDFW

SEQ ID NO: 40195 - protein, 17 aa, Homo sapiens
CASEDYGSEISRPIDYW

SEQ ID NO: 40196 - protein, 15 aa, Homo sapiens
CAHARHSSGWPFEYW

SEQ ID NO: 40197 - protein, 14 aa, Homo sapiens
CARPGLSGGDYDYW

SEQ ID NO: 40198 - protein, 17 aa, Homo sapiens
CGKSLRAAETPHYFDYW

SEQ ID NO: 40199 - protein, 15 aa, Homo sapiens
CARDRLGFGELGDYW

SEQ ID NO: 40200 - protein, 14 aa, Homo sapiens
CAKDMGANKIFDYW

SEQ ID NO: 40201 - protein, 18 aa, Homo sapiens
CAHIDYSDDPGLGSFDTW

SEQ ID NO: 40202 - protein, 25 aa, Homo sapiens
CTTLPYDYDILTGSRGRPHWYFDLW

SEQ ID NO: 40203 - protein, 15 aa, Homo sapiens
CAKASTGDHYYFDSW

SEQ ID NO: 40204 - protein, 17 aa, Homo sapiens
CAKDTGDFDGRPDFDYW

SEQ ID NO: 40205 - protein, 12 aa, Homo sapiens
CQSADSNSNILF

SEQ ID NO: 40206 - protein, 16 aa, Homo sapiens
CARHKRSPRGDCFDYW

SEQ ID NO: 40207 - protein, 22 aa, Homo sapiens
CARARSITMIVVARAVDAFDIW

SEQ ID NO: 40208 - protein, 23 aa, Homo sapiens
CARVGQTYYYGSGSYYFDYFDYW

SEQ ID NO: 40209 - protein, 17 aa, Homo sapiens
CAKDRHTLTIFARFDYW

SEQ ID NO: 40210 - protein, 14 aa, Homo sapiens
CARSRYPTYYCDSW

SEQ ID NO: 40211 - protein, 20 aa, Homo sapiens
CASLFKVASATGVHWYFDLW

SEQ ID NO: 40212 - protein, 16 aa, Homo sapiens
CARVQGGNYRDAFDIW

SEQ ID NO: 40213 - protein, 17 aa, Homo sapiens
CAGERNYDTISGALDVW

SEQ ID NO: 40214 - protein, 20 aa, Homo sapiens
CAKEPYSGIAAAGTNWFDPW

SEQ ID NO: 40215 - protein, 21 aa, Homo sapiens
CARDRTYYDSSGYYLPAFDIW

SEQ ID NO: 40216 - protein, 15 aa, Homo sapiens
CASGSYSPLSAFDIW

SEQ ID NO: 40217 - protein, 16 aa, Homo sapiens
CAKGGHSSGYRHFDYW

SEQ ID NO: 40218 - protein, 14 aa, Homo sapiens
CATYMTTVTHVDYW

SEQ ID NO: 40219 - protein, 18 aa, Homo sapiens
CARHSPKTTVTTGRFDYW

SEQ ID NO: 40220 - protein, 18 aa, Homo sapiens
CAHRRQYYYSRGDAFDIW

SEQ ID NO: 40221 - protein, 18 aa, Homo sapiens
CVRQLGDLYYFWSGIDYW

SEQ ID NO: 40222 - protein, 19 aa, Homo sapiens
CARGGDYSGSGSEPDFDYW

SEQ ID NO: 40223 - protein, 15 aa, Homo sapiens
CARHTGHQLLHFDYW

SEQ ID NO: 40224 - protein, 16 aa, Homo sapiens
CAKEGEYSSSWQFDYW

SEQ ID NO: 40225 - protein, 21 aa, Homo sapiens
CARDRSAYYDSSGLYNWFDPW

SEQ ID NO: 40226 - protein, 15 aa, Homo sapiens
CARPSVADIWYFDLW

SEQ ID NO: 40227 - protein, 14 aa, Homo sapiens
CAKKYSNNWHFDDW

SEQ ID NO: 40228 - protein, 22 aa, Homo sapiens
CARGLGEEWWARGYYYYGMDLW

SEQ ID NO: 40229 - protein, 12 aa, Homo sapiens
CTTDPRLPLDYW

SEQ ID NO: 40230 - protein, 18 aa, Homo sapiens
CARRRQQLVGFEGWFDPW

SEQ ID NO: 40231 - protein, 17 aa, Homo sapiens
CAKDGAPSTVTTAFDIW

SEQ ID NO: 40232 - protein, 14 aa, Homo sapiens
CARRGGMREYFDYW

SEQ ID NO: 40233 - protein, 17 aa, Homo sapiens
CAKGDWKWLRSEAADYW

SEQ ID NO: 40234 - protein, 18 aa, Homo sapiens
CAKDSSSGWKPKYYFDYW

SEQ ID NO: 40235 - protein, 18 aa, Homo sapiens
CARLRGYSDYDNNWFDPW

SEQ ID NO: 40236 - protein, 19 aa, Homo sapiens
CATFRGQEWLQTLRAFDMW

SEQ ID NO: 40237 - protein, 19 aa, Homo sapiens
CARHMVRGGTIKGDAFDIW

SEQ ID NO: 40238 - protein, 19 aa, Homo sapiens
CARVPYCSTTSCYSYFDPW

SEQ ID NO: 40239 - protein, 20 aa, Homo sapiens
CARDRVDYYGSGSYYWFDPW

SEQ ID NO: 40240 - protein, 18 aa, Homo sapiens
CARGLRGYTSSWDYFEFW

SEQ ID NO: 40241 - protein, 23 aa, Homo sapiens
CARQGWFGELFPLQNPKYYFDYW

SEQ ID NO: 40242 - protein, 21 aa, Homo sapiens
CARDRQIVVVPAATATWFDPW

SEQ ID NO: 40243 - protein, 20 aa, Homo sapiens
CVRDDSRRDDSAWYDAFDLW

SEQ ID NO: 40244 - protein, 12 aa, Homo sapiens
CQQSYFTSSLAF

SEQ ID NO: 40245 - protein, 18 aa, Homo sapiens
CARQERGSGNYHWYFDLW

SEQ ID NO: 40246 - protein, 25 aa, Homo sapiens
CARDIALVTYYYDSLRLGEDAFDIW

SEQ ID NO: 40247 - protein, 16 aa, Homo sapiens
CVHSPPRAIGRYFDSW

SEQ ID NO: 40248 - protein, 14 aa, Homo sapiens
CATPYGSGTYFYYW

SEQ ID NO: 40249 - protein, 16 aa, Homo sapiens
CAKDIGGWSKGEFDYW

SEQ ID NO: 40250 - protein, 14 aa, Homo sapiens
CAHRWLRYRLFDYW

SEQ ID NO: 40251 - protein, 26 aa, Homo sapiens
CARAPRTSKLVQLGRGLSDHDVFDLW

SEQ ID NO: 40252 - protein, 23 aa, Homo sapiens
CARDIHYDILTGYSYYYYYMDVW

SEQ ID NO: 40253 - protein, 17 aa, Homo sapiens
CARDGVGGGAFYHADYW

SEQ ID NO: 40254 - protein, 24 aa, Homo sapiens
CARQPGIAVAGTLFYYYYYYMDVW

SEQ ID NO: 40255 - protein, 22 aa, Homo sapiens
CARGQGRLPGSGWYVARASDYW

SEQ ID NO: 40256 - protein, 20 aa, Homo sapiens
CAIAGAHYYGSGSYYAFDYW

SEQ ID NO: 40257 - protein, 11 aa, Homo sapiens
CMQSVQVPQSF

SEQ ID NO: 40258 - protein, 20 aa, Homo sapiens
CARGAKLLWFGELLGYMDVW

SEQ ID NO: 40259 - protein, 16 aa, Homo sapiens
CAKFSDRSQVVAFDIW

SEQ ID NO: 40260 - protein, 18 aa, Homo sapiens
CARQVKTIALAGKYFDSW

SEQ ID NO: 40261 - protein, 22 aa, Homo sapiens
CARVRSGSGSHPNYYYYYMDVW

SEQ ID NO: 40262 - protein, 16 aa, Homo sapiens
CANHKAAGHWHAFDLW

SEQ ID NO: 40263 - protein, 24 aa, Homo sapiens
CARQAGLRKVWGSYRNSHDGFDIW

SEQ ID NO: 40264 - protein, 16 aa, Homo sapiens
CAKDPGSAWFYYFESW

SEQ ID NO: 40265 - protein, 15 aa, Homo sapiens
CAFHYGDQRDAFDIW

SEQ ID NO: 40266 - protein, 17 aa, Homo sapiens
CTRDLGLWWWHDAFDIW

SEQ ID NO: 40267 - protein, 17 aa, Homo sapiens
CARDLSPGGFGELCDYW

SEQ ID NO: 40268 - protein, 19 aa, Homo sapiens
CARDPYRSTAAAGEYFQHW

SEQ ID NO: 40269 - protein, 17 aa, Homo sapiens
CAHRLVRRNKGDAFDIW

SEQ ID NO: 40270 - protein, 18 aa, Homo sapiens
CAKDIRRGYSYGNTFDMW

SEQ ID NO: 40271 - protein, 22 aa, Homo sapiens
CARDPYRGYSGYEYYYYGMDVW

SEQ ID NO: 40272 - protein, 20 aa, Homo sapiens
CARGPYSSSWYGQKYYFDYW

SEQ ID NO: 40273 - protein, 21 aa, Homo sapiens
CARGFSVTILGLNYYYYMDVW

SEQ ID NO: 40274 - protein, 21 aa, Homo sapiens
CARCRILPVGLRSLITTFDLW

SEQ ID NO: 40275 - protein, 19 aa, Homo sapiens
CAKGSIFGVAFELGYFDLW

SEQ ID NO: 40276 - protein, 18 aa, Homo sapiens
CAKDSKYGVWLLYYFDYW

SEQ ID NO: 40277 - protein, 17 aa, Homo sapiens
CAKDADSGSYGDAFDIW

SEQ ID NO: 40278 - protein, 16 aa, Homo sapiens
CARDPSVVVNNWFDPW

SEQ ID NO: 40279 - protein, 12 aa, Homo sapiens
CQEYYTTPSCAF

SEQ ID NO: 40280 - protein, 20 aa, Homo sapiens
CARDTWEQRGPRYYFYMDVW

SEQ ID NO: 40281 - protein, 20 aa, Homo sapiens
CAKAIYSSGWYGFSCWFDPW

SEQ ID NO: 40282 - protein, 20 aa, Homo sapiens
CAKVLDYYGSGSLTYYFDYW

SEQ ID NO: 40283 - protein, 24 aa, Homo sapiens
CAKEYTRGIYDFWSGYLPDAFDIW

SEQ ID NO: 40284 - protein, 21 aa, Homo sapiens
CARDGPFRVYGSGSYDYFDYW

SEQ ID NO: 40285 - protein, 16 aa, Homo sapiens
CAKDIGRGYSYGIDYW

SEQ ID NO: 40286 - protein, 18 aa, Homo sapiens
CARDAVESGFSYAYQDYW

SEQ ID NO: 40287 - protein, 15 aa, Homo sapiens
CARDVFGEVAIPDYW

SEQ ID NO: 40288 - protein, 11 aa, Homo sapiens
CQHAASFPLTF

SEQ ID NO: 40289 - protein, 22 aa, Homo sapiens
CARQKLPRITTTQDLPDAFDMW

SEQ ID NO: 40290 - protein, 19 aa, Homo sapiens
CARGYHYDIDGHGGGFDIW

SEQ ID NO: 40291 - protein, 22 aa, Homo sapiens
CARPAVEYYDILTGYHDAFDIW

SEQ ID NO: 40292 - protein, 14 aa, Homo sapiens
CARGLTVASYFDVW

SEQ ID NO: 40293 - protein, 24 aa, Homo sapiens
CARHHIAAAGPYLGWYYYYGLDVW

SEQ ID NO: 40294 - protein, 21 aa, Homo sapiens
CAKDLSLRYFDWWRNDAFDIW

SEQ ID NO: 40295 - protein, 21 aa, Homo sapiens
CARHPYSGYEKFYYYYYMDVW

SEQ ID NO: 40296 - protein, 15 aa, Homo sapiens
CAKRGWHSPDAFDVW

SEQ ID NO: 40297 - protein, 23 aa, Homo sapiens
CARDRDPAPDIVVVVAASAFDYW

SEQ ID NO: 40298 - protein, 22 aa, Homo sapiens
CARDSTVTTRPETYYYYGMDVW

SEQ ID NO: 40299 - protein, 17 aa, Homo sapiens
CARITAISGLMTLFDYW

SEQ ID NO: 40300 - protein, 20 aa, Homo sapiens
CARDNRQNYRSESFKWLDPW

SEQ ID NO: 40301 - protein, 17 aa, Homo sapiens
CARTPASPSFGFSFDLW

SEQ ID NO: 40302 - protein, 24 aa, Homo sapiens
CARGPGYCTNGVCYTGAIRYFDLW

SEQ ID NO: 40303 - protein, 22 aa, Homo sapiens
CARVVPHITMIVVAMASWFDPW

SEQ ID NO: 40304 - protein, 17 aa, Homo sapiens
CANGDSSGWYDGAFDYW

SEQ ID NO: 40305 - protein, 14 aa, Homo sapiens
CARRLGGRTTFDHW

SEQ ID NO: 40306 - protein, 16 aa, Homo sapiens
CARVGYGDYVSYFQHW

SEQ ID NO: 40307 - protein, 22 aa, Homo sapiens
CARAGGDWGVAYPYYNYGMDVW

SEQ ID NO: 40308 - protein, 15 aa, Homo sapiens
CAETGSGTPDWFDPW

SEQ ID NO: 40309 - protein, 17 aa, Homo sapiens
CARHRYNSGFGPYFDYW

SEQ ID NO: 40310 - protein, 32 aa, Homo sapiens
CALPISAVYYCARDSTFRLHLFRVCCGYFDYW

SEQ ID NO: 40311 - protein, 21 aa, Homo sapiens
CATRLWLGDLLSAASGTFDVW

SEQ ID NO: 40312 - protein, 17 aa, Homo sapiens
CAREGKDYSDKRGIDYW

SEQ ID NO: 40313 - protein, 20 aa, Homo sapiens
CASPSEIQLWSKGPYYFDYW

SEQ ID NO: 40314 - protein, 14 aa, Homo sapiens
CARDGTNGLSFDHW

SEQ ID NO: 40315 - protein, 20 aa, Homo sapiens
CASHCPLSAVASRFCWFDPW

SEQ ID NO: 40316 - protein, 27 aa, Homo sapiens
CAKDIARWPENYYGSGSYFGDYAFDIW

SEQ ID NO: 40317 - protein, 17 aa, Homo sapiens
CAKDLSDYYYYYGMDVW

SEQ ID NO: 40318 - protein, 22 aa, Homo sapiens
CARSPVLRYFDWLFSLDGMDVW

SEQ ID NO: 40319 - protein, 20 aa, Homo sapiens
CAALSCSGLSCYSNGRFDYW

SEQ ID NO: 40320 - protein, 25 aa, Homo sapiens
CARSPEYHDNNDYYYRVYYYYMDVW

SEQ ID NO: 40321 - protein, 15 aa, Homo sapiens
CARLTFGPIYYFDYW

SEQ ID NO: 40322 - protein, 20 aa, Homo sapiens
CARGAARYGSGNYYPPFDLW

SEQ ID NO: 40323 - protein, 20 aa, Homo sapiens
CALVSLSSSWYQLDWYFDLW

SEQ ID NO: 40324 - protein, 18 aa, Homo sapiens
CAKDTRYYYGSGTQFDYW

SEQ ID NO: 40325 - protein, 20 aa, Homo sapiens
CAREGYYYGSGSYSSAFDIW

SEQ ID NO: 40326 - protein, 15 aa, Homo sapiens
CARSIAAGLDWFDPW

SEQ ID NO: 40327 - protein, 18 aa, Homo sapiens
CASAPSLDSYFYYYMDVW

SEQ ID NO: 40328 - protein, 25 aa, Homo sapiens
CARLLGYYDSSGYYLRSTLYYFDYW

SEQ ID NO: 40329 - protein, 23 aa, Homo sapiens
CARDLQLQNFDWLFKSPGAFDIW

SEQ ID NO: 40330 - protein, 13 aa, Homo sapiens
CQSYDSTDRTVVF

SEQ ID NO: 40331 - protein, 15 aa, Homo sapiens
CVRDWGGIEAAGDYW

SEQ ID NO: 40332 - protein, 16 aa, Homo sapiens
CARSGVGSTTEAFDYW

SEQ ID NO: 40333 - protein, 22 aa, Homo sapiens
CARLTYFYGSGLFYNVGTWDYW

SEQ ID NO: 40334 - protein, 19 aa, Homo sapiens
CARDRDSSGYYMSPDFDYW

SEQ ID NO: 40335 - protein, 16 aa, Homo sapiens
CARTIAVAGGYAFDIW

SEQ ID NO: 40336 - protein, 14 aa, Homo sapiens
CAHRRIMGRGLDYW

SEQ ID NO: 40337 - protein, 20 aa, Homo sapiens
CAHSAITMVRGVPSDAFDIW

SEQ ID NO: 40338 - protein, 21 aa, Homo sapiens
CASSYNYDKTGYYHASWFDPW

SEQ ID NO: 40339 - protein, 18 aa, Homo sapiens
CAVEGFYGSGRAGYFDNW

SEQ ID NO: 40340 - protein, 19 aa, Homo sapiens
CARGPHQFGELGSYFFDSW

SEQ ID NO: 40341 - protein, 25 aa, Homo sapiens
CARGRSQVVTAFPAQFYYYYYMDVW

SEQ ID NO: 40342 - protein, 14 aa, Homo sapiens
CARVVYGDWYIDYW

SEQ ID NO: 40343 - protein, 13 aa, Homo sapiens
CARDSSSWYVTYW

SEQ ID NO: 40344 - protein, 20 aa, Homo sapiens
CARPLMYDHDSSGQDAFDIW

SEQ ID NO: 40345 - protein, 23 aa, Homo sapiens
CAKDGSNLRYFDWLFHTDAFDIW

SEQ ID NO: 40346 - protein, 25 aa, Homo sapiens
CARSPVNRTPMLVVVLQRRGAFDIW

SEQ ID NO: 40347 - protein, 19 aa, Homo sapiens
CARRGDCSGGSCDGWFDAW

SEQ ID NO: 40348 - protein, 18 aa, Homo sapiens
CARLPKGGDQGVGAFDIW

SEQ ID NO: 40349 - protein, 14 aa, Homo sapiens
CARAFQRFDSFDIW

SEQ ID NO: 40350 - protein, 20 aa, Homo sapiens
CARDDSRRHDSVWYDSFDIW

SEQ ID NO: 40351 - protein, 18 aa, Homo sapiens
CARIKGGKYYIGHYFDYW

SEQ ID NO: 40352 - protein, 17 aa, Homo sapiens
CAKGYYGSGSLPYFDHW

SEQ ID NO: 40353 - protein, 15 aa, Homo sapiens
CARLGRGAAMEVDYW

SEQ ID NO: 40354 - protein, 19 aa, Homo sapiens
CAKVRGWTYDSSGYYFDYW

SEQ ID NO: 40355 - protein, 20 aa, Homo sapiens
CARGITARETTITFPYFDYW

SEQ ID NO: 40356 - protein, 20 aa, Homo sapiens
CARDSYFDWLLYKEYYMDVW

SEQ ID NO: 40357 - protein, 22 aa, Homo sapiens
CARDRGYYDSSGYYYVDYFDYW

SEQ ID NO: 40358 - protein, 24 aa, Homo sapiens
CARGCQQQLVQYPFWDYYYYMDVW

SEQ ID NO: 40359 - protein, 17 aa, Homo sapiens
CARDQEQWLVRGWFDPW

SEQ ID NO: 40360 - protein, 22 aa, Homo sapiens
CARGGQYYYDSSGYYYAAFDIW

SEQ ID NO: 40361 - protein, 18 aa, Homo sapiens
CARGIVVVPAAGLFFDYW

SEQ ID NO: 40362 - protein, 20 aa, Homo sapiens
CARQITMVRGITISSGIDYW

SEQ ID NO: 40363 - protein, 19 aa, Homo sapiens
CTRDRRLGSSSWQYYFDYW

SEQ ID NO: 40364 - protein, 20 aa, Homo sapiens
CAKDPVSPSSSWFPNCFDPW

SEQ ID NO: 40365 - protein, 21 aa, Homo sapiens
CAKSYYDIFSGYTAGDSFDMW

SEQ ID NO: 40366 - protein, 14 aa, Homo sapiens
CASGGDFVPYFDSW

SEQ ID NO: 40367 - protein, 19 aa, Homo sapiens
CATELRYFDWLVDKWFEPW

SEQ ID NO: 40368 - protein, 20 aa, Homo sapiens
CARLSMILLRGVIINYFDHW

SEQ ID NO: 40369 - protein, 12 aa, Homo sapiens
CQQNYNAPQATF

SEQ ID NO: 40370 - protein, 17 aa, Homo sapiens
CARIRGYYPDYYYMDFW

SEQ ID NO: 40371 - protein, 13 aa, Homo sapiens
CQSVDSSGPYRIF

SEQ ID NO: 40372 - protein, 17 aa, Homo sapiens
CATWYYYGSRNMDFDYW

SEQ ID NO: 40373 - protein, 19 aa, Homo sapiens
CARDPYVGIGWGSWYFDLW

SEQ ID NO: 40374 - protein, 17 aa, Homo sapiens
CTRAPSYYDNYYGMDVW

SEQ ID NO: 40375 - protein, 13 aa, Homo sapiens
CAREHLRGAFDYW

SEQ ID NO: 40376 - protein, 22 aa, Homo sapiens
CAKRPLLLWFGELSDTYYFDYW

SEQ ID NO: 40377 - protein, 19 aa, Homo sapiens
CARGTSVGVRGLIITPDYW

SEQ ID NO: 40378 - protein, 17 aa, Homo sapiens
CAVGFDSSGSRGYFAHW

SEQ ID NO: 40379 - protein, 18 aa, Homo sapiens
CARHADSWSGLINWFDPW

SEQ ID NO: 40380 - protein, 12 aa, Homo sapiens
CHQYNNWSPWTF

SEQ ID NO: 40381 - protein, 16 aa, Homo sapiens
CAKGGYVGAADPFDYW

SEQ ID NO: 40382 - protein, 16 aa, Homo sapiens
CASQRGYSYECYFDYW

SEQ ID NO: 40383 - protein, 17 aa, Homo sapiens
CARGAGGYRKHWYFDLW

SEQ ID NO: 40384 - protein, 19 aa, Homo sapiens
CARAPVLLVFSPTAFFDYW

SEQ ID NO: 40385 - protein, 27 aa, Homo sapiens
CARGRGDLRWYGTSNEIRRKTYYFDYW

SEQ ID NO: 40386 - protein, 18 aa, Homo sapiens
CARVGSRSSWYLPRVDYW

SEQ ID NO: 40387 - protein, 13 aa, Homo sapiens
CAHRQGGSYFDYW

SEQ ID NO: 40388 - protein, 13 aa, Homo sapiens
CVERGYYYGADYW

SEQ ID NO: 40389 - protein, 19 aa, Homo sapiens
CAKDGPRPYGDKRGFVDYW

SEQ ID NO: 40390 - protein, 11 aa, Homo sapiens
CVRGQDWLDPW

SEQ ID NO: 40391 - protein, 15 aa, Homo sapiens
CAKEGWFGEKKIDYW

SEQ ID NO: 40392 - protein, 26 aa, Homo sapiens
CARGAPDGAVAGILYTYYYYYYKDVW

SEQ ID NO: 40393 - protein, 16 aa, Homo sapiens
CVKDHSGITSGAFHVW

SEQ ID NO: 40394 - protein, 15 aa, Homo sapiens
CACTGSSWAYYFDYW

SEQ ID NO: 40395 - protein, 32 aa, Homo sapiens
CALPICSLKASDTAMYYCARHGWYPHDVFDIW

SEQ ID NO: 40396 - protein, 16 aa, Homo sapiens
CARGPRYFDWFGVDYW

SEQ ID NO: 40397 - protein, 17 aa, Homo sapiens
CARAVDPAKGLIAFDIW

SEQ ID NO: 40398 - protein, 20 aa, Homo sapiens
CARVPPPILWFGELSYFQHW

SEQ ID NO: 40399 - protein, 13 aa, Homo sapiens
CASGGGHPGFDYW

SEQ ID NO: 40400 - protein, 23 aa, Homo sapiens
CARHVIAAAGTPFHRKSNWFDPW

SEQ ID NO: 40401 - protein, 18 aa, Homo sapiens
CAKRCGRGVLPHGYFDSW

SEQ ID NO: 40402 - protein, 23 aa, Homo sapiens
CARDPHVDTAMVRGRGIYYFDYW

SEQ ID NO: 40403 - protein, 16 aa, Homo sapiens
CARDREYSNGDAFDVW

SEQ ID NO: 40404 - protein, 25 aa, Homo sapiens
CARLTIFGVVISYLRTGSNWYFDLW

SEQ ID NO: 40405 - protein, 13 aa, Homo sapiens
CLSADRSDTYEVF

SEQ ID NO: 40406 - protein, 27 aa, Homo sapiens
CATAPGVGFGAGDWMSVHGPGNWFDPW

SEQ ID NO: 40407 - protein, 16 aa, Homo sapiens
CARDDANWNHAWFDPW

SEQ ID NO: 40408 - protein, 22 aa, Homo sapiens
CARVQVRRGNFMVLPYWYFDLW

SEQ ID NO: 40409 - protein, 18 aa, Homo sapiens
CARRAPSSSWTGGTFDIW

SEQ ID NO: 40410 - protein, 24 aa, Homo sapiens
CARDRPHNIPSSGWTYYYYGMDVW

SEQ ID NO: 40411 - protein, 22 aa, Homo sapiens
CAKDPSLRYFDWLSPPLAFDYW

SEQ ID NO: 40412 - protein, 14 aa, Homo sapiens
CARLNERSTLFDYW

SEQ ID NO: 40413 - protein, 16 aa, Homo sapiens
CARADYGDYDDAFDIW

SEQ ID NO: 40414 - protein, 20 aa, Homo sapiens
CARGDLHQWLVLADWYFDLW

SEQ ID NO: 40415 - protein, 18 aa, Homo sapiens
CARNPLRGGNMYNCFDPW

SEQ ID NO: 40416 - protein, 16 aa, Homo sapiens
CARRPVGPGNGYLDYW

SEQ ID NO: 40417 - protein, 17 aa, Homo sapiens
CAKDASSSLPYNWLDPW

SEQ ID NO: 40418 - protein, 15 aa, Homo sapiens
CARETPTARSFFDQW

SEQ ID NO: 40419 - protein, 21 aa, Homo sapiens
CARHEVITIFGVVIIGHFDYW

SEQ ID NO: 40420 - protein, 18 aa, Homo sapiens
CAKAIMVTFGDVNAFDIW

SEQ ID NO: 40421 - protein, 16 aa, Homo sapiens
CARGRVAAAGYWFDPW

SEQ ID NO: 40422 - protein, 15 aa, Homo sapiens
CRLYYYYGSESPDYW

SEQ ID NO: 40423 - protein, 25 aa, Homo sapiens
CARANQGVGDIVVVVALYYYYMDVW

SEQ ID NO: 40424 - protein, 19 aa, Homo sapiens
CARDHGLGIGSGEDAFDIW

SEQ ID NO: 40425 - protein, 17 aa, Homo sapiens
CASGWQQLVRSAVFDYW

SEQ ID NO: 40426 - protein, 18 aa, Homo sapiens
CARIRVGVMARGYYIDYW

SEQ ID NO: 40427 - protein, 22 aa, Homo sapiens
CARRGVYSSGWYTEPHYYFDYW

SEQ ID NO: 40428 - protein, 14 aa, Homo sapiens
CARVMIVGLAFDIW

SEQ ID NO: 40429 - protein, 23 aa, Homo sapiens
CATVIAVAGTPEGYGYYYGMDVW

SEQ ID NO: 40430 - protein, 19 aa, Homo sapiens
CARDGRIQLWGVNWYFDLW

SEQ ID NO: 40431 - protein, 16 aa, Homo sapiens
CAREGFGQFLYYFDYW

SEQ ID NO: 40432 - protein, 22 aa, Homo sapiens
CARDAPVYYDSSGYYYTLFDYW

SEQ ID NO: 40433 - protein, 21 aa, Homo sapiens
CATTVSHHSRTWLSSLIADYW

SEQ ID NO: 40434 - protein, 16 aa, Homo sapiens
CARHEVTIAAPPFDYW

SEQ ID NO: 40435 - protein, 17 aa, Homo sapiens
CARHWSVGVAMGPFRYW

SEQ ID NO: 40436 - protein, 22 aa, Homo sapiens
CARHGMMPLGGVPFPHYAFDTW

SEQ ID NO: 40437 - protein, 24 aa, Homo sapiens
CARGIPLITIFGVVISPYDAFDIW

SEQ ID NO: 40438 - protein, 18 aa, Homo sapiens
CARDWRIVPAAMSYMDVW

SEQ ID NO: 40439 - protein, 16 aa, Homo sapiens
CAKDTCTNALCYSDFW

SEQ ID NO: 40440 - protein, 15 aa, Homo sapiens
CARRSGGWERYHDYW

SEQ ID NO: 40441 - protein, 12 aa, Homo sapiens
CQQRSTWRRDTF

SEQ ID NO: 40442 - protein, 19 aa, Homo sapiens
CAREGIRGSSWFSNAFDIW

SEQ ID NO: 40443 - protein, 17 aa, Homo sapiens
CARLLHPTYSDWYFDLW

SEQ ID NO: 40444 - protein, 21 aa, Homo sapiens
CASGIGATAGPSVYYYYMDVW

SEQ ID NO: 40445 - protein, 14 aa, Homo sapiens
CARAHKELLGPDYW

SEQ ID NO: 40446 - protein, 17 aa, Homo sapiens
CARMVCRGYDSTDNDYW

SEQ ID NO: 40447 - protein, 16 aa, Homo sapiens
CARELDSSSWPPIDYW

SEQ ID NO: 40448 - protein, 14 aa, Homo sapiens
CASGYGRGDGFDIW

SEQ ID NO: 40449 - protein, 16 aa, Homo sapiens
CASPKDTAMANAFDIW

SEQ ID NO: 40450 - protein, 34 aa, Homo sapiens
CSLGAEDTAVYYCARHEDFVEYLWTNSYYYMDVW

SEQ ID NO: 40451 - protein, 16 aa, Homo sapiens
CATDARRELTGLFDYW

SEQ ID NO: 40452 - protein, 22 aa, Homo sapiens
CATYYYDSSGYYFSGPDAFDIW

SEQ ID NO: 40453 - protein, 20 aa, Homo sapiens
CARGYSRFLEWSNPFYFDSW

SEQ ID NO: 40454 - protein, 13 aa, Homo sapiens
CTAHTPPPRIDYW

SEQ ID NO: 40455 - protein, 21 aa, Homo sapiens
CARHSPYTIFGVVITEYFDYW

SEQ ID NO: 40456 - protein, 14 aa, Homo sapiens
CAKVPPVAGYFDYW

SEQ ID NO: 40457 - protein, 14 aa, Homo sapiens
CARDYGGDGIFDYW

SEQ ID NO: 40458 - protein, 16 aa, Homo sapiens
CAHIFRRDSVIWFDPW

SEQ ID NO: 40459 - protein, 15 aa, Homo sapiens
CARDPGIHDPTFDLW

SEQ ID NO: 40460 - protein, 15 aa, Homo sapiens
CAKGYYDILTGSDYW

SEQ ID NO: 40461 - protein, 23 aa, Homo sapiens
CAKAQGYFDWLFNQDYYYGMDVW

SEQ ID NO: 40462 - protein, 22 aa, Homo sapiens
CARDGQGYCTNGVCYTGGVDYW

SEQ ID NO: 40463 - protein, 18 aa, Homo sapiens
CVRVNAGYRSGYYYFDYW

SEQ ID NO: 40464 - protein, 18 aa, Homo sapiens
CAKARTPYSSGWYGGDYW

SEQ ID NO: 40465 - protein, 19 aa, Homo sapiens
CARGPYYYDSSDQEYFQHW

SEQ ID NO: 40466 - protein, 17 aa, Homo sapiens
CARRENCGGDCRAFGVW

SEQ ID NO: 40467 - protein, 20 aa, Homo sapiens
CARHVERQRRSDFLYPFDLW

SEQ ID NO: 40468 - protein, 14 aa, Homo sapiens
CANQQLVDDAFDIW

SEQ ID NO: 40469 - protein, 16 aa, Homo sapiens
CARGHGGYRHVELDYW

SEQ ID NO: 40470 - protein, 13 aa, Homo sapiens
CARGPPEAEIDYW

SEQ ID NO: 40471 - protein, 21 aa, Homo sapiens
CARGYIIQRITMVRGDAFDIW

SEQ ID NO: 40472 - protein, 18 aa, Homo sapiens
CARRRITMVRRSDAFDIW

SEQ ID NO: 40473 - protein, 15 aa, Homo sapiens
CARLGGVDTASIDYW

SEQ ID NO: 40474 - protein, 18 aa, Homo sapiens
CARAGYSSGWYWGVVDYW

SEQ ID NO: 40475 - protein, 16 aa, Homo sapiens
CARHERGIKKYYMDVW

SEQ ID NO: 40476 - protein, 16 aa, Homo sapiens
CAKGAELAAAVFFDYW

SEQ ID NO: 40477 - protein, 16 aa, Homo sapiens
CAAIDYGDYTGYFDPW

SEQ ID NO: 40478 - protein, 20 aa, Homo sapiens
CARGLLRFLEWPFTGSFDIW

SEQ ID NO: 40479 - protein, 16 aa, Homo sapiens
CARDQSGVIGTWQDYW

SEQ ID NO: 40480 - protein, 21 aa, Homo sapiens
CVKDWDYMAAVGGGDVWFDSW

SEQ ID NO: 40481 - protein, 25 aa, Homo sapiens
CARDVRKDYYDSSGYYYYYYGMDVW

SEQ ID NO: 40482 - protein, 17 aa, Homo sapiens
CARETLAARPGNWFDPW

SEQ ID NO: 40483 - protein, 17 aa, Homo sapiens
CTTDPGIAVAGYYFDYW

SEQ ID NO: 40484 - protein, 15 aa, Homo sapiens
CARGGGGFDWLFHYW

SEQ ID NO: 40485 - protein, 21 aa, Homo sapiens
CARDNTFRLSGYAIIQRNDYW

SEQ ID NO: 40486 - protein, 18 aa, Homo sapiens
CASLTVTGIGPLEYFQHW

SEQ ID NO: 40487 - protein, 15 aa, Homo sapiens
CARVRFKWLRLFDPW

SEQ ID NO: 40488 - protein, 18 aa, Homo sapiens
CATGRVRGLRHYYYMDVW

SEQ ID NO: 40489 - protein, 23 aa, Homo sapiens
CAKDCYRLRLGELSPGADAFDIW

SEQ ID NO: 40490 - protein, 24 aa, Homo sapiens
CARDMKLLKAASGWYPRRGAFDIW

SEQ ID NO: 40491 - protein, 13 aa, Homo sapiens
CSSYAGSHNLMVF

SEQ ID NO: 40492 - protein, 24 aa, Homo sapiens
CAREWGWGYCSGGSCYDGAVFDYW

SEQ ID NO: 40493 - protein, 20 aa, Homo sapiens
CAKDTAMVPPYYYYYYMDVW

SEQ ID NO: 40494 - protein, 23 aa, Homo sapiens
CARTTNYDYVWGSYRYTQYFDYW

SEQ ID NO: 40495 - protein, 17 aa, Homo sapiens
CARRPQYYYASGPFDHW

SEQ ID NO: 40496 - protein, 18 aa, Homo sapiens
CVKVNTMIVVVISFFDFW

SEQ ID NO: 40497 - protein, 20 aa, Homo sapiens
CARDYVPMVVAGKGSWFDPW

SEQ ID NO: 40498 - protein, 21 aa, Homo sapiens
CATNLHDTNNYFLGGDYFNYW

SEQ ID NO: 40499 - protein, 17 aa, Homo sapiens
CAKDLAYDYGDYGPDYW

SEQ ID NO: 40500 - protein, 24 aa, Homo sapiens
CAKDMYYHGYSSSWYYSSLNFDYW

SEQ ID NO: 40501 - protein, 21 aa, Homo sapiens
CARGVPLVRGSITVVPLLDYW

SEQ ID NO: 40502 - protein, 17 aa, Homo sapiens
CAKGQSRGWSGYYFDYW

SEQ ID NO: 40503 - protein, 15 aa, Homo sapiens
CARWGLVTTGPFDYW

SEQ ID NO: 40504 - protein, 16 aa, Homo sapiens
CARPRSGSYYNPLDYW

SEQ ID NO: 40505 - protein, 24 aa, Homo sapiens
CARVRGGLRRILFLTHSDDAFDIW

SEQ ID NO: 40506 - protein, 16 aa, Homo sapiens
CATMTTAGTVWHFDLW

SEQ ID NO: 40507 - protein, 19 aa, Homo sapiens
CTTEVYGSGSYYFDAFDIW

SEQ ID NO: 40508 - protein, 16 aa, Homo sapiens
CAKFPFSITMVRVDYW

SEQ ID NO: 40509 - protein, 11 aa, Homo sapiens
CAKLDGDLDYW

SEQ ID NO: 40510 - protein, 14 aa, Homo sapiens
CATLSGYAGAFDLW

SEQ ID NO: 40511 - protein, 20 aa, Homo sapiens
CVRGGRSVAGTPRFGTFDLW

SEQ ID NO: 40512 - protein, 21 aa, Homo sapiens
CVRQSKLASGISAAGNPFEYW

SEQ ID NO: 40513 - protein, 23 aa, Homo sapiens
CARGRSILWFGELLPTYWYFDLW

SEQ ID NO: 40514 - protein, 22 aa, Homo sapiens
CTKDGGYCSGGTCSVISAFDVW

SEQ ID NO: 40515 - protein, 16 aa, Homo sapiens
CARGGRMGGYDPFDYW

SEQ ID NO: 40516 - protein, 17 aa, Homo sapiens
CANTMTTALLPNRFDYW

SEQ ID NO: 40517 - protein, 23 aa, Homo sapiens
CARDGEGLRYFDWSVDYWYFDLW

SEQ ID NO: 40518 - protein, 15 aa, Homo sapiens
CAKVPTSNYGAFDIW

SEQ ID NO: 40519 - protein, 21 aa, Homo sapiens
CARGGYCSSSSCYAVRSFDPW

SEQ ID NO: 40520 - protein, 22 aa, Homo sapiens
CARSDRFSGEMAKILRRPFDPW

SEQ ID NO: 40521 - protein, 18 aa, Homo sapiens
CARSKEYLSDDNWYFDLW

SEQ ID NO: 40522 - protein, 21 aa, Homo sapiens
CARGDCSSTSCYEGQLLFDYW

SEQ ID NO: 40523 - protein, 15 aa, Homo sapiens
CTRLSLAGALIFDYW

SEQ ID NO: 40524 - protein, 13 aa, Homo sapiens
CAKSDTTMLFDYW

SEQ ID NO: 40525 - protein, 19 aa, Homo sapiens
CAATPNDYDSGHYDAFNMW

SEQ ID NO: 40526 - protein, 17 aa, Homo sapiens
CATLNGRGYSGYDFVYW

SEQ ID NO: 40527 - protein, 18 aa, Homo sapiens
CARLYYYDSGSPFAYDVW

SEQ ID NO: 40528 - protein, 23 aa, Homo sapiens
CAREEGAYYDILTGYYPYYFDYW

SEQ ID NO: 40529 - protein, 21 aa, Homo sapiens
CARSPNFETSYYYYIPWFDPW

SEQ ID NO: 40530 - protein, 16 aa, Homo sapiens
CAAVWQLVQPHYFNYW

SEQ ID NO: 40531 - protein, 23 aa, Homo sapiens
CARVLPSYLRYFDWSSDPAFDYW

SEQ ID NO: 40532 - protein, 21 aa, Homo sapiens
CAKDVDTGGSFLEYYYGMDVW

SEQ ID NO: 40533 - protein, 19 aa, Homo sapiens
CARKTGYSGDPLYNWFDPW

SEQ ID NO: 40534 - protein, 22 aa, Homo sapiens
CARPNNQAYDAYESKSHYFDYW

SEQ ID NO: 40535 - protein, 16 aa, Homo sapiens
CANTPTDIVATIRDYW

SEQ ID NO: 40536 - protein, 16 aa, Homo sapiens
CARDYGGGSVRGFDFW

SEQ ID NO: 40537 - protein, 16 aa, Homo sapiens
CASVRSSYGSEGFDYW

SEQ ID NO: 40538 - protein, 20 aa, Homo sapiens
CARGTLVANLWHYYYYMDVW

SEQ ID NO: 40539 - protein, 23 aa, Homo sapiens
CARAPGLGLWLPGYGVPYYFDYW

SEQ ID NO: 40540 - protein, 16 aa, Homo sapiens
CATCASGSYSCAFDVW

SEQ ID NO: 40541 - protein, 14 aa, Homo sapiens
CARHANAYGDFKYW

SEQ ID NO: 40542 - protein, 14 aa, Homo sapiens
CARAVTMVRGFDYW

SEQ ID NO: 40543 - protein, 14 aa, Homo sapiens
CAVFSGWYSPFDNW

SEQ ID NO: 40544 - protein, 18 aa, Homo sapiens
CARGNIVVVVAATEFDYW

SEQ ID NO: 40545 - protein, 18 aa, Homo sapiens
CARDINGIGGSYSYFDYW

SEQ ID NO: 40546 - protein, 19 aa, Homo sapiens
CAKVAFGVLGQWLTHFDYW

SEQ ID NO: 40547 - protein, 17 aa, Homo sapiens
CAKAPSWATVTTPLDYW

SEQ ID NO: 40548 - protein, 17 aa, Homo sapiens
CAKGSESIAVGGTVDYW

SEQ ID NO: 40549 - protein, 19 aa, Homo sapiens
CAREGTYQYGSGSSFFDYW

SEQ ID NO: 40550 - protein, 18 aa, Homo sapiens
CVKDQDDFWNGYSGFDNW

SEQ ID NO: 40551 - protein, 19 aa, Homo sapiens
CAKERYSGIIAVAGHFDYW

SEQ ID NO: 40552 - protein, 21 aa, Homo sapiens
CARDKPAELTSDHVQGYFDLW

SEQ ID NO: 40553 - protein, 16 aa, Homo sapiens
CARRLDSSSYDTFDIW

SEQ ID NO: 40554 - protein, 18 aa, Homo sapiens
CAREICSSWSPDDAFDIW

SEQ ID NO: 40555 - protein, 21 aa, Homo sapiens
CAKDGTLLRFGELLWNYMDVW

SEQ ID NO: 40556 - protein, 21 aa, Homo sapiens
CARGDSGYLGGHYYYYYMDVW

SEQ ID NO: 40557 - protein, 14 aa, Homo sapiens
CARGRDYSEYFDSW

SEQ ID NO: 40558 - protein, 19 aa, Homo sapiens
CAREGFFGMFLVAGTLDYW

SEQ ID NO: 40559 - protein, 15 aa, Homo sapiens
CAKDHSGWTHAFDVW

SEQ ID NO: 40560 - protein, 20 aa, Homo sapiens
CAKDVKPVGYSTGWHHFDFW

SEQ ID NO: 40561 - protein, 16 aa, Homo sapiens
CAWIHCSGGCCYFDYW

SEQ ID NO: 40562 - protein, 10 aa, Homo sapiens
CARTIQNDYW

SEQ ID NO: 40563 - protein, 17 aa, Homo sapiens
CAKGRGFYDSTGYIDYW

SEQ ID NO: 40564 - protein, 24 aa, Homo sapiens
CAHRLPLPQKSGTTYWYSDYFQFW

SEQ ID NO: 40565 - protein, 22 aa, Homo sapiens
CARHGPHDHYDSSGSSLGFDYW

SEQ ID NO: 40566 - protein, 17 aa, Homo sapiens
CAREGKIAVAAGAFDFW

SEQ ID NO: 40567 - protein, 17 aa, Homo sapiens
CARDRSIYSNLYVFDYW

SEQ ID NO: 40568 - protein, 21 aa, Homo sapiens
CARAGRQLWFGESHTGSFDPW

SEQ ID NO: 40569 - protein, 21 aa, Homo sapiens
CARVVESSDSWKSYYTRFDYW

SEQ ID NO: 40570 - protein, 19 aa, Homo sapiens
CAMCGSGNYALGNDAFDFW

SEQ ID NO: 40571 - protein, 16 aa, Homo sapiens
CAATRREMATDGFDIW

SEQ ID NO: 40572 - protein, 21 aa, Homo sapiens
CARARRQWLRLPRGVYYFDYW

SEQ ID NO: 40573 - protein, 17 aa, Homo sapiens
CARGYDGGYSYAFFDYW

SEQ ID NO: 40574 - protein, 25 aa, Homo sapiens
CARGPASSSSSWYVVFYYYYGMDVW

SEQ ID NO: 40575 - protein, 12 aa, Homo sapiens
CQALDSSTLWMF

SEQ ID NO: 40576 - protein, 16 aa, Homo sapiens
CAKELGYSSGWYLGYW

SEQ ID NO: 40577 - protein, 20 aa, Homo sapiens
CARAFRGYYGSGRGSPFDYW

SEQ ID NO: 40578 - protein, 20 aa, Homo sapiens
CARDKSPSKTDFWSGGFDYW

SEQ ID NO: 40579 - protein, 16 aa, Homo sapiens
CARLTYDSRGYSLDYW

SEQ ID NO: 40580 - protein, 21 aa, Homo sapiens
CARGGYCSGGSCYRLDAFDIW

SEQ ID NO: 40581 - protein, 20 aa, Homo sapiens
CARAGVGIAARGTIWDFGYW

SEQ ID NO: 40582 - protein, 17 aa, Homo sapiens
CASSAYSHGNVEYFNYW

SEQ ID NO: 40583 - protein, 23 aa, Homo sapiens
CARDVDYYDSSGYYYGVAGEDYW

SEQ ID NO: 40584 - protein, 24 aa, Homo sapiens
CARGFPIAVAGILVPYYYYYMDVW

SEQ ID NO: 40585 - protein, 11 aa, Homo sapiens
CQQLKSSPLIF

SEQ ID NO: 40586 - protein, 21 aa, Homo sapiens
CAKEVRFLEWLLSWHNYFDYW

SEQ ID NO: 40587 - protein, 19 aa, Homo sapiens
CARGLLYSGSGSSFWFDPW

SEQ ID NO: 40588 - protein, 18 aa, Homo sapiens
CVRPGNSYTSGWYFFDSW

SEQ ID NO: 40589 - protein, 19 aa, Homo sapiens
CARGVNHYGSGTYLDFDHW

SEQ ID NO: 40590 - protein, 14 aa, Homo sapiens
CAPYWIQLSWFDPW

SEQ ID NO: 40591 - protein, 24 aa, Homo sapiens
CARVGREITVAVTDYHYYYYMDVW

SEQ ID NO: 40592 - protein, 16 aa, Homo sapiens
CARHMYSSPGSPSDYW

SEQ ID NO: 40593 - protein, 19 aa, Homo sapiens
CARHLPQGYYGSGSYPDYW

SEQ ID NO: 40594 - protein, 21 aa, Homo sapiens
CAREGRCSGGSCVYYYGMDVW

SEQ ID NO: 40595 - protein, 23 aa, Homo sapiens
CARVLSCSSTSCYQYAGYYMDVW

SEQ ID NO: 40596 - protein, 20 aa, Homo sapiens
CATRTGFGELFHPTDAFDIW

SEQ ID NO: 40597 - protein, 23 aa, Homo sapiens
CATGVPPSYGYVSMIDYYYMDVW

SEQ ID NO: 40598 - protein, 20 aa, Homo sapiens
CARDWFDASQQTSSGAFDIW

SEQ ID NO: 40599 - protein, 22 aa, Homo sapiens
CARGARGRIVVVVTELHYFDYW

SEQ ID NO: 40600 - protein, 15 aa, Homo sapiens
CAHSSMAAAGAFDYW

SEQ ID NO: 40601 - protein, 20 aa, Homo sapiens
CARAGTEFYSGYDYAWFDYW

SEQ ID NO: 40602 - protein, 18 aa, Homo sapiens
CARDPYDYLWGSQTIDYW

SEQ ID NO: 40603 - protein, 20 aa, Homo sapiens
CARLTAPSIYYNSPFHFDYW

SEQ ID NO: 40604 - protein, 22 aa, Homo sapiens
CARVLLLTEYTNAWYGDALDIW

SEQ ID NO: 40605 - protein, 21 aa, Homo sapiens
CARGHIDGTSWLKQSWYFDLW

SEQ ID NO: 40606 - protein, 18 aa, Homo sapiens
CARPYGSGSYYNGWFDPW

SEQ ID NO: 40607 - protein, 19 aa, Homo sapiens
CAKDRRLGIAVAGTAFDIW

SEQ ID NO: 40608 - protein, 28 aa, Homo sapiens
CAKSTQGYDILTGYYDWLLSYDWYFDLW

SEQ ID NO: 40609 - protein, 16 aa, Homo sapiens
CARVPGMTTVMRLDYW

SEQ ID NO: 40610 - protein, 19 aa, Homo sapiens
CARPLTTVTTRGGNWFDPW

SEQ ID NO: 40611 - protein, 14 aa, Homo sapiens
CAKDLHYWSAADYW

SEQ ID NO: 40612 - protein, 16 aa, Homo sapiens
CAKSTRGYFYGYLDYW

SEQ ID NO: 40613 - protein, 18 aa, Homo sapiens
CARRSGWGIAVASTFDYW

SEQ ID NO: 40614 - protein, 17 aa, Homo sapiens
CARDLHNFGRYYYMDVW

SEQ ID NO: 40615 - protein, 23 aa, Homo sapiens
CAREGKGPYDILTGYSYDAFDIW

SEQ ID NO: 40616 - protein, 20 aa, Homo sapiens
CAYTSITKTRGVGTNWFGPW

SEQ ID NO: 40617 - protein, 15 aa, Homo sapiens
CARRRWDWGGFFDYW

SEQ ID NO: 40618 - protein, 16 aa, Homo sapiens
CAKDIGVQLANYFDYW

SEQ ID NO: 40619 - protein, 20 aa, Homo sapiens
CARVGPWTITMIRDHLFDYW

SEQ ID NO: 40620 - protein, 29 aa, Homo sapiens
CARLPRTHIDSSSWYRYSSGWYELYFDYW

SEQ ID NO: 40621 - protein, 24 aa, Homo sapiens
CARRKKMYYDILTGYYEGNWLDPW

SEQ ID NO: 40622 - protein, 21 aa, Homo sapiens
CARGGPNADIAKSGTNYFDPW

SEQ ID NO: 40623 - protein, 22 aa, Homo sapiens
CARARYDYVWGSYRYTEAFDMW

SEQ ID NO: 40624 - protein, 19 aa, Homo sapiens
CAHTQYDILTGHTENFDYW

SEQ ID NO: 40625 - protein, 20 aa, Homo sapiens
CARDRNSYYDSSGYFAFDIW

SEQ ID NO: 40626 - protein, 19 aa, Homo sapiens
CARVGGDSSGYYHYYFDYW

SEQ ID NO: 40627 - protein, 13 aa, Homo sapiens
CARDSLALGLDYW

SEQ ID NO: 40628 - protein, 15 aa, Homo sapiens
CARISSSSRLIYDYW

SEQ ID NO: 40629 - protein, 15 aa, Homo sapiens
CAKAPAGGVGYFDYW

SEQ ID NO: 40630 - protein, 16 aa, Homo sapiens
CARNGGQVSYGDLDYW

SEQ ID NO: 40631 - protein, 17 aa, Homo sapiens
CAKDRGSTTWEYFFDDW

SEQ ID NO: 40632 - protein, 20 aa, Homo sapiens
CARTGGPRYCSGSINWFDPW

SEQ ID NO: 40633 - protein, 16 aa, Homo sapiens
CARGGLSGSSSWFDYW

SEQ ID NO: 40634 - protein, 14 aa, Homo sapiens
CAKSPSGWPLFDYW

SEQ ID NO: 40635 - protein, 14 aa, Homo sapiens
CARDRSGTSPFDIW

SEQ ID NO: 40636 - protein, 17 aa, Homo sapiens
CVRDTERQEQLGTFDYW

SEQ ID NO: 40637 - protein, 18 aa, Homo sapiens
CARARITMIVVVNAFDIW

SEQ ID NO: 40638 - protein, 18 aa, Homo sapiens
CASNTGIHFNSYFYMDVW

SEQ ID NO: 40639 - protein, 21 aa, Homo sapiens
CARAGMITFGGVIVIDAFDIW

SEQ ID NO: 40640 - protein, 22 aa, Homo sapiens
CAKDEGHKFRLVHYYYYGMDVW

SEQ ID NO: 40641 - protein, 15 aa, Homo sapiens
CARGGGGLSITIDYW

SEQ ID NO: 40642 - protein, 17 aa, Homo sapiens
CAKEQQWLVRRYWFDPW

SEQ ID NO: 40643 - protein, 18 aa, Homo sapiens
CVITIRTHTVSTTGVDYW

SEQ ID NO: 40644 - protein, 18 aa, Homo sapiens
CASLNLRSDSTYGYSDYW

SEQ ID NO: 40645 - protein, 22 aa, Homo sapiens
CARQGRIAIFGVVAHLGYFDYW

SEQ ID NO: 40646 - protein, 20 aa, Homo sapiens
CATLEHHYYDSSGHGAFDIW

SEQ ID NO: 40647 - protein, 19 aa, Homo sapiens
CARGPPNGQQWRVGYFDYW

SEQ ID NO: 40648 - protein, 16 aa, Homo sapiens
CARLAEDGSDAWFDPW

SEQ ID NO: 40649 - protein, 17 aa, Homo sapiens
CATGISMVRGTPYFDYW

SEQ ID NO: 40650 - protein, 17 aa, Homo sapiens
CARLRIFLAVADIFDYW

SEQ ID NO: 40651 - protein, 18 aa, Homo sapiens
CARDPGGDYRAMGWFDPW

SEQ ID NO: 40652 - protein, 17 aa, Homo sapiens
CARPRYNWNRNYYFDYW

SEQ ID NO: 40653 - protein, 11 aa, Homo sapiens
CQQYDVVPWNF

SEQ ID NO: 40654 - protein, 24 aa, Homo sapiens
CVRERGYCSSPSCPFYYHYYMDVW

SEQ ID NO: 40655 - protein, 14 aa, Homo sapiens
CAKEIAAAETGDYW

SEQ ID NO: 40656 - protein, 25 aa, Homo sapiens
CARAQTGITMIVVVTPYYYYGMDVW

SEQ ID NO: 40657 - protein, 16 aa, Homo sapiens
CAKAGSGRNNYYFDSW

SEQ ID NO: 40658 - protein, 23 aa, Homo sapiens
CARKLGTYDSLIGYSHQKPFDSW

SEQ ID NO: 40659 - protein, 22 aa, Homo sapiens
CARRSLGYCTNGVCYISAFDIW

SEQ ID NO: 40660 - protein, 17 aa, Homo sapiens
CARLIYYGSGSYYFDYW

SEQ ID NO: 40661 - protein, 18 aa, Homo sapiens
CARSRGELSLLIDAFDIW

SEQ ID NO: 40662 - protein, 16 aa, Homo sapiens
CASIRIYSSSWLVDYW

SEQ ID NO: 40663 - protein, 24 aa, Homo sapiens
CARAPTRRITIFGVVIISGYFDYW

SEQ ID NO: 40664 - protein, 18 aa, Homo sapiens
CAHSLFEYSSSCGWFDSW

SEQ ID NO: 40665 - protein, 19 aa, Homo sapiens
CTTDRYYDILTGYIHLDYW

SEQ ID NO: 40666 - protein, 15 aa, Homo sapiens
CAKGRGVAAAEFDYW

SEQ ID NO: 40667 - protein, 12 aa, Homo sapiens
CYSAADNNYWVF

SEQ ID NO: 40668 - protein, 18 aa, Homo sapiens
CARHGYRGHSAVDPFDIW

SEQ ID NO: 40669 - protein, 25 aa, Homo sapiens
CARDVRHMITFGGVIYLGPSNFDYW

SEQ ID NO: 40670 - protein, 10 aa, Homo sapiens
CQQYHIYSSF

SEQ ID NO: 40671 - protein, 21 aa, Homo sapiens
CATDPGIWFGELYYYHGMDVW

SEQ ID NO: 40672 - protein, 21 aa, Homo sapiens
CSKAPGGGIIAAGAFYFFDTW

SEQ ID NO: 40673 - protein, 17 aa, Homo sapiens
CQAWDSCTEGDSCTEVF

SEQ ID NO: 40674 - protein, 10 aa, Homo sapiens
CVVSNSYDYW

SEQ ID NO: 40675 - protein, 17 aa, Homo sapiens
CARAPDGFGVGMSFDIW

SEQ ID NO: 40676 - protein, 20 aa, Homo sapiens
CARVSGFLVVPAARSCFDPW

SEQ ID NO: 40677 - protein, 15 aa, Homo sapiens
CAKDRKAAAWAFDIW

SEQ ID NO: 40678 - protein, 17 aa, Homo sapiens
CARAQRITMIVGAFDIW

SEQ ID NO: 40679 - protein, 25 aa, Homo sapiens
CARVRPLWFGELLSKASRNNWFDPW

SEQ ID NO: 40680 - protein, 19 aa, Homo sapiens
CAKGFTEGMLHDWDYFDYW

SEQ ID NO: 40681 - protein, 22 aa, Homo sapiens
CASVRGPDCSGGSCYSNYFDYW

SEQ ID NO: 40682 - protein, 19 aa, Homo sapiens
CAKVSYGYWLGGQGPFDYW

SEQ ID NO: 40683 - protein, 21 aa, Homo sapiens
CARGSGDIVMVVAITDAFDIW

SEQ ID NO: 40684 - protein, 15 aa, Homo sapiens
CARRSETGDTAMDYW

SEQ ID NO: 40685 - protein, 16 aa, Homo sapiens
CARVSSSWSYDAFDIW

SEQ ID NO: 40686 - protein, 21 aa, Homo sapiens
CARDPVLRYFDWLPSYYFDYW

SEQ ID NO: 40687 - protein, 19 aa, Homo sapiens
CARDPRGWLESPRWYFDLW

SEQ ID NO: 40688 - protein, 19 aa, Homo sapiens
CATRVEEWELLGHDAFDIW

SEQ ID NO: 40689 - protein, 28 aa, Homo sapiens
CARDGRDRYYDILTGYYRRDDYYYMDVW

SEQ ID NO: 40690 - protein, 17 aa, Homo sapiens
CAKAFIAAAGPDAFDIW

SEQ ID NO: 40691 - protein, 15 aa, Homo sapiens
CAKGGTLLTGWFDPW

SEQ ID NO: 40692 - protein, 15 aa, Homo sapiens
CARVWGTVTTYLDYW

SEQ ID NO: 40693 - protein, 25 aa, Homo sapiens
CAAGPYYDSSGYYYETYYYYGMDVW

SEQ ID NO: 40694 - protein, 18 aa, Homo sapiens
CAKGVGAQVLRSYYMDVW

SEQ ID NO: 40695 - protein, 12 aa, Homo sapiens
CAKGYSGYDSYW

SEQ ID NO: 40696 - protein, 15 aa, Homo sapiens
CARDLGAAWLEPDYW

SEQ ID NO: 40697 - protein, 22 aa, Homo sapiens
CARAPLGYSGSWYGGDGAFDIW

SEQ ID NO: 40698 - protein, 19 aa, Homo sapiens
CARSRGDRYGYLVDYFDYW

SEQ ID NO: 40699 - protein, 17 aa, Homo sapiens
CARADSSSWYYVSFDYW

SEQ ID NO: 40700 - protein, 17 aa, Homo sapiens
CTTDWMTTVTTYAFDIW

SEQ ID NO: 40701 - protein, 21 aa, Homo sapiens
CARDPTPQYSSSWINNWFDPW

SEQ ID NO: 40702 - protein, 21 aa, Homo sapiens
CAKSERGSQRGAEVTVHFDLW

SEQ ID NO: 40703 - protein, 24 aa, Homo sapiens
CARGILGYCSSTSCYAGPYYFDYW

SEQ ID NO: 40704 - protein, 22 aa, Homo sapiens
CARSPATDSYDSSGPWSYFDYW

SEQ ID NO: 40705 - protein, 16 aa, Homo sapiens
CAKAPFTVTTSYFDYW

SEQ ID NO: 40706 - protein, 23 aa, Homo sapiens
CARGKITMVRGVIFGAAIYFDYW

SEQ ID NO: 40707 - protein, 15 aa, Homo sapiens
CVKAPPQILGYFDYW

SEQ ID NO: 40708 - protein, 20 aa, Homo sapiens
CARATMVRGVIIGPLYFDYW

SEQ ID NO: 40709 - protein, 15 aa, Homo sapiens
CAKVHSGPWTPFDYW

SEQ ID NO: 40710 - protein, 22 aa, Homo sapiens
CARGGKYYDILTGYFHDAFDIW

SEQ ID NO: 40711 - protein, 17 aa, Homo sapiens
CARGYDILTGYLYFDYW

SEQ ID NO: 40712 - protein, 14 aa, Homo sapiens
CARVFVAADYLDRW

SEQ ID NO: 40713 - protein, 15 aa, Homo sapiens
CAKAYGYYYYAMDVW

SEQ ID NO: 40714 - protein, 18 aa, Homo sapiens
CARHRQQWLVQGWYFDLW

SEQ ID NO: 40715 - protein, 19 aa, Homo sapiens
CARHTSRLISPTFWYFDLW

SEQ ID NO: 40716 - protein, 19 aa, Homo sapiens
CAKSPAGTEHYYYYYMDVW

SEQ ID NO: 40717 - protein, 21 aa, Homo sapiens
CAKDPPLNFDWLEAVDAFDIW

SEQ ID NO: 40718 - protein, 17 aa, Homo sapiens
CAREDDAVAGTPPFDYW

SEQ ID NO: 40719 - protein, 18 aa, Homo sapiens
CAHRLGGPIVDTAMVDYW

SEQ ID NO: 40720 - protein, 15 aa, Homo sapiens
CTKDHSTDSAGMDYW

SEQ ID NO: 40721 - protein, 18 aa, Homo sapiens
CASIRIAVAGGDYAFDIW

SEQ ID NO: 40722 - protein, 21 aa, Homo sapiens
CARGYYGSGSYFPGPDEFDNW

SEQ ID NO: 40723 - protein, 20 aa, Homo sapiens
CARVRGGYSYGLGLNYFDYW

SEQ ID NO: 40724 - protein, 21 aa, Homo sapiens
CAKDLRQLLYFADSGWYFDLW

SEQ ID NO: 40725 - protein, 22 aa, Homo sapiens
CARLFNGYDPSLAKYFYYMDVW

SEQ ID NO: 40726 - protein, 29 aa, Homo sapiens
CARDDLGRAPNAVSADDLRKYHYYGMDVW

SEQ ID NO: 40727 - protein, 15 aa, Homo sapiens
CASHRWYGDDAFDIW

SEQ ID NO: 40728 - protein, 33 aa, Homo sapiens
CARDGPIPTYYYGSGTYYNPRVARGDDDAFDIW

SEQ ID NO: 40729 - protein, 20 aa, Homo sapiens
CARDPRQYSSGWYPYYFAYW

SEQ ID NO: 40730 - protein, 18 aa, Homo sapiens
CARIRDYYGSGGPHLDYW

SEQ ID NO: 40731 - protein, 15 aa, Homo sapiens
CARQPSGWHYYFDSW

SEQ ID NO: 40732 - protein, 16 aa, Homo sapiens
CAKDRWGLTPGSFDYW

SEQ ID NO: 40733 - protein, 16 aa, Homo sapiens
CAKSFGWAGIEVFDYW

SEQ ID NO: 40734 - protein, 18 aa, Homo sapiens
CAKDFYMVRGVSHYFDYW

SEQ ID NO: 40735 - protein, 19 aa, Homo sapiens
CAKDVVGATTWTLGPFDYW

SEQ ID NO: 40736 - protein, 18 aa, Homo sapiens
CAGSSFHVRLSSRGFDYW

SEQ ID NO: 40737 - protein, 20 aa, Homo sapiens
CARSISAVVSITHGVFFDLW

SEQ ID NO: 40738 - protein, 10 aa, Homo sapiens
CQQTYSAPFF

SEQ ID NO: 40739 - protein, 22 aa, Homo sapiens
CARDRSLITIFGVVTRDAFDIW

SEQ ID NO: 40740 - protein, 18 aa, Homo sapiens
CASLPYYYGSGSSWFDPW

SEQ ID NO: 40741 - protein, 22 aa, Homo sapiens
CARDYWFQQLGQSYYYYGMDVW

SEQ ID NO: 40742 - protein, 18 aa, Homo sapiens
CARADLSLWFGDKWFDPW

SEQ ID NO: 40743 - protein, 25 aa, Homo sapiens
CTTALRQYYYDSSGYYRRVNWFDPW

SEQ ID NO: 40744 - protein, 17 aa, Homo sapiens
CAKDFNPQGDGEYFQHW

SEQ ID NO: 40745 - protein, 15 aa, Homo sapiens
CAREEYNYGRHFDSW

SEQ ID NO: 40746 - protein, 22 aa, Homo sapiens
CAKDDSGHSSGWTYYYYGMDVW

SEQ ID NO: 40747 - protein, 13 aa, Homo sapiens
CARETGWTTLDYW

SEQ ID NO: 40748 - protein, 22 aa, Homo sapiens
CARHGTYFDWLFHSFAAYFDYW

SEQ ID NO: 40749 - protein, 16 aa, Homo sapiens
CAKGHFTLTNTAMDYW

SEQ ID NO: 40750 - protein, 21 aa, Homo sapiens
CARRALGYCSGGSCYSAFDIW

SEQ ID NO: 40751 - protein, 16 aa, Homo sapiens
CAKDILTMVRGVFDYW

SEQ ID NO: 40752 - protein, 14 aa, Homo sapiens
CAKAVAGTPLFDIW

SEQ ID NO: 40753 - protein, 15 aa, Homo sapiens
CARDYGDYYWYFDLW

SEQ ID NO: 40754 - protein, 14 aa, Homo sapiens
CARDELLQLLIDYW

SEQ ID NO: 40755 - protein, 20 aa, Homo sapiens
CARVVVTMVRGVPGDWFDPW

SEQ ID NO: 40756 - protein, 23 aa, Homo sapiens
CARDTPHGGSWPFPNLGGPFDPW

SEQ ID NO: 40757 - protein, 15 aa, Homo sapiens
CAKGYNYGFNYFDYW

SEQ ID NO: 40758 - protein, 13 aa, Homo sapiens
CARLSDYDTFDFW

SEQ ID NO: 40759 - protein, 21 aa, Homo sapiens
CARGLGGSYFPAYYYYGMDVW

SEQ ID NO: 40760 - protein, 26 aa, Homo sapiens
CARDAKMRAPDVLRYFDWVPDAFDIW

SEQ ID NO: 40761 - protein, 20 aa, Homo sapiens
CARAPPGYSSSWHIRAFDIW

SEQ ID NO: 40762 - protein, 16 aa, Homo sapiens
CARAWGNGGYALFDYW

SEQ ID NO: 40763 - protein, 25 aa, Homo sapiens
CARDLGLLWFGELLTTSTKDAFDIW

SEQ ID NO: 40764 - protein, 20 aa, Homo sapiens
CAKDIYDSSGYDLWAPFDYW

SEQ ID NO: 40765 - protein, 16 aa, Homo sapiens
CTTAPYSSGWYVLDYW

SEQ ID NO: 40766 - protein, 18 aa, Homo sapiens
CARMREATWGGGGYFDLW

SEQ ID NO: 40767 - protein, 19 aa, Homo sapiens
CVRRGQGYDFWSGFSLDYW

SEQ ID NO: 40768 - protein, 16 aa, Homo sapiens
CARDPWAVGGRYFDSW

SEQ ID NO: 40769 - protein, 21 aa, Homo sapiens
CARDRSDLDSTTNYGDYFQFW

SEQ ID NO: 40770 - protein, 24 aa, Homo sapiens
CARDSSLITIFGVVIRALTYFDYW

SEQ ID NO: 40771 - protein, 16 aa, Homo sapiens
CAREAGGAAPGSFDYW

SEQ ID NO: 40772 - protein, 18 aa, Homo sapiens
CAREGQVSLLWFGELDYW

SEQ ID NO: 40773 - protein, 28 aa, Homo sapiens
CAKDIEEGLDIVVVVAATYGTTYAFDIW

SEQ ID NO: 40774 - protein, 13 aa, Homo sapiens
CARHYFYRIFDYW

SEQ ID NO: 40775 - protein, 14 aa, Homo sapiens
CQQRSDWPPVAITF

SEQ ID NO: 40776 - protein, 21 aa, Homo sapiens
CARDKKEEPWLGELSQFFDNW

SEQ ID NO: 40777 - protein, 19 aa, Homo sapiens
CARDLMNRYGVYVENSDYW

SEQ ID NO: 40778 - protein, 14 aa, Homo sapiens
CVRQLATTYYFDYW

SEQ ID NO: 40779 - protein, 17 aa, Homo sapiens
CARGRIRWLVGIEFDYW

SEQ ID NO: 40780 - protein, 24 aa, Homo sapiens
CARKSRRGITMILVVNFFDAFDIW

SEQ ID NO: 40781 - protein, 23 aa, Homo sapiens
CAKVATDLQWLGVEFYYYYMDVW

SEQ ID NO: 40782 - protein, 14 aa, Homo sapiens
CAKPRIAAPAFDTW

SEQ ID NO: 40783 - protein, 19 aa, Homo sapiens
CARLPYADMVRGVILFDYW

SEQ ID NO: 40784 - protein, 11 aa, Homo sapiens
CLSGDEDIRVF

SEQ ID NO: 40785 - protein, 16 aa, Homo sapiens
CARDNSWLLIGAHDYW

SEQ ID NO: 40786 - protein, 15 aa, Homo sapiens
CAKALIVLGGFFDYW

SEQ ID NO: 40787 - protein, 19 aa, Homo sapiens
CTRSYSGSRPDPNDAFDIW

SEQ ID NO: 40788 - protein, 22 aa, Homo sapiens
CARGWGGYCTGGSCYSGYFDYW

SEQ ID NO: 40789 - protein, 15 aa, Homo sapiens
CAREVDRGVEWFDPW

SEQ ID NO: 40790 - protein, 26 aa, Homo sapiens
CARSPPTYYDFWSGNNYYYYYGMDVW

SEQ ID NO: 40791 - protein, 19 aa, Homo sapiens
CARMPPYYYGTSGSAFDIW

SEQ ID NO: 40792 - protein, 18 aa, Homo sapiens
CARHGGSSWYDDDAFDIW

SEQ ID NO: 40793 - protein, 17 aa, Homo sapiens
CARVEDYGDYEGVFDYW

SEQ ID NO: 40794 - protein, 20 aa, Homo sapiens
CARVPRHPLRYFETGYFDLW

SEQ ID NO: 40795 - protein, 15 aa, Homo sapiens
CAKATRFGEHWFDPW

SEQ ID NO: 40796 - protein, 18 aa, Homo sapiens
CARTYGSGREYHNWFDPW

SEQ ID NO: 40797 - protein, 17 aa, Homo sapiens
CARDRIIQLIIEGPDYW

SEQ ID NO: 40798 - protein, 17 aa, Homo sapiens
CAKDILDSSSWYYFDYW

SEQ ID NO: 40799 - protein, 13 aa, Homo sapiens [sequence omitted]

SEQ ID NO: 40800 - protein, 17 aa, Homo sapiens
CTTEGRLDNIRGAFDIW

SEQ ID NO: 40801 - protein, 23 aa, Homo sapiens
CARDLYYYGSGSYYRRGYYFDYW

SEQ ID NO: 40802 - protein, 16 aa, Homo sapiens
CATWTNYGDYKGVDYW

SEQ ID NO: 40803 - protein, 17 aa, Homo sapiens
CARLGLWADYYYGMDVW

SEQ ID NO: 40804 - protein, 23 aa, Homo sapiens
CARDGPIVLRYFDWLLKGSFDYW

SEQ ID NO: 40805 - protein, 20 aa, Homo sapiens
CTTESPVVRDPRNPLSFDYW

SEQ ID NO: 40806 - protein, 23 aa, Homo sapiens
CARVGKQWLVRERDYYYYYMDVW

SEQ ID NO: 40807 - protein, 18 aa, Homo sapiens
CARDPRSYSSSWYGFDYW

SEQ ID NO: 40808 - protein, 22 aa, Homo sapiens
CAKEKAGSGSYYSQRGFAFDIW

SEQ ID NO: 40809 - protein, 17 aa, Homo sapiens
CARGDYGDYYYYYMDVW

SEQ ID NO: 40810 - protein, 15 aa, Homo sapiens
CARACSGCPSHFDFW

SEQ ID NO: 40811 - protein, 27 aa, Homo sapiens
CARDKSHVWTESADTGGDKPLWFFDVW

SEQ ID NO: 40812 - protein, 16 aa, Homo sapiens
CATRYFDWLVWPFDIW

SEQ ID NO: 40813 - protein, 17 aa, Homo sapiens
CARLLWGWLPPPIVDYW

SEQ ID NO: 40814 - protein, 24 aa, Homo sapiens
CARERILRYFDWFSPHYYYGMDVW

SEQ ID NO: 40815 - protein, 20 aa, Homo sapiens
CARAITMVRGVITSYYFDYW

SEQ ID NO: 40816 - protein, 16 aa, Homo sapiens
CAKDSSSLGGGGFDYW

SEQ ID NO: 40817 - protein, 26 aa, Homo sapiens
CARGRTPSTVDDYVWGSYPADAFDIW

SEQ ID NO: 40818 - protein, 23 aa, Homo sapiens
CARHGYCTSSSCYKSYYYGMDVW

SEQ ID NO: 40819 - protein, 11 aa, Homo sapiens
CLQTYSTPGIF

SEQ ID NO: 40820 - protein, 19 aa, Homo sapiens
CARDSLWGSGHTYDAFDIW

SEQ ID NO: 40821 - protein, 13 aa, Homo sapiens
CVSRWSYDHYDYW

SEQ ID NO: 40822 - protein, 17 aa, Homo sapiens
CAKGGSYGDSPFYFDYW

SEQ ID NO: 40823 - protein, 17 aa, Homo sapiens
CAKDIRGDYAYDAFDIW

SEQ ID NO: 40824 - protein, 17 aa, Homo sapiens
CARQIGLSRGSGAFDIW

SEQ ID NO: 40825 - protein, 15 aa, Homo sapiens
CSSYTSSSSLSIWVF

SEQ ID NO: 40826 - protein, 23 aa, Homo sapiens
CAKDFYDGSGYYYRPLRVVADYW

SEQ ID NO: 40827 - protein, 29 aa, Homo sapiens
CARGTYCSGGSCYFLSMFHPGDDDAFDIW

SEQ ID NO: 40828 - protein, 15 aa, Homo sapiens
CAKVSRTAAMGIDYW

SEQ ID NO: 40829 - protein, 18 aa, Homo sapiens
CARLPQLSVNYYYGMDVW

SEQ ID NO: 40830 - protein, 20 aa, Homo sapiens
CARDLDNGIAAAGPQYFDYW

SEQ ID NO: 40831 - protein, 20 aa, Homo sapiens
CVKDISLRVNRVAGIGLDYW

SEQ ID NO: 40832 - protein, 16 aa, Homo sapiens
CAKGVYGDLYYYFDYW

SEQ ID NO: 40833 - protein, 21 aa, Homo sapiens
CARDRRLRLGELSLYDAFDIW

SEQ ID NO: 40834 - protein, 19 aa, Homo sapiens
CARGSDFGDNWLLNYFDYW

SEQ ID NO: 40835 - protein, 17 aa, Homo sapiens
CARRYGDYLGRYAFDIW

SEQ ID NO: 40836 - protein, 17 aa, Homo sapiens
CARVPGITGTPGAFDIW

SEQ ID NO: 40837 - protein, 15 aa, Homo sapiens
CAKGRDWGSYYFDYW

SEQ ID NO: 40838 - protein, 18 aa, Homo sapiens
CARYPGIEVSGTGGIDYW

SEQ ID NO: 40839 - protein, 19 aa, Homo sapiens
CARHPYLQSDYYYYAMDVW

SEQ ID NO: 40840 - protein, 16 aa, Homo sapiens
CARRAKGHFEYYFDYW

SEQ ID NO: 40841 - protein, 24 aa, Homo sapiens
CARDAGSRDGYKLSFGDPYYFDDW

SEQ ID NO: 40842 - protein, 17 aa, Homo sapiens
CARESEWELPPSAFDIW

SEQ ID NO: 40843 - protein, 20 aa, Homo sapiens
CARGAHYSYGGGFYWGFDSW

SEQ ID NO: 40844 - protein, 20 aa, Homo sapiens
CAAQPAWTMVRGVKLAFDIW

SEQ ID NO: 40845 - protein, 16 aa, Homo sapiens
CAKDNTPRNLYYFDYW

SEQ ID NO: 40846 - protein, 27 aa, Homo sapiens
CARGSAPNVPLFRFLDWLSPRGHFDYW

SEQ ID NO: 40847 - protein, 17 aa, Homo sapiens
CAAVPFSVVPIDPFDVW

SEQ ID NO: 40848 - protein, 13 aa, Homo sapiens
CGRTGLVGAIDYW

SEQ ID NO: 40849 - protein, 16 aa, Homo sapiens
CARERYFAQVGAFDIW

SEQ ID NO: 40850 - protein, 13 aa, Homo sapiens
CARSFFYTYMDVW

SEQ ID NO: 40851 - protein, 22 aa, Homo sapiens
CARDHSVVVTGLYYQNYGMDVW

SEQ ID NO: 40852 - protein, 14 aa, Homo sapiens
CTRSLQWLLAFDLW

SEQ ID NO: 40853 - protein, 22 aa, Homo sapiens
CAREDFRITIFGVVTRRGIDYW

SEQ ID NO: 40854 - protein, 20 aa, Homo sapiens
CARLSPENEVTGDPCASDIW

SEQ ID NO: 40855 - protein, 31 aa, Homo sapiens
CALPILRASDTAMYYCATPRTEWLRVAFDVW

SEQ ID NO: 40856 - protein, 16 aa, Homo sapiens
CAKGDITIFGSTFDYW

SEQ ID NO: 40857 - protein, 22 aa, Homo sapiens
CARDRPLLWFGELSDHDAFDIW

SEQ ID NO: 40858 - protein, 17 aa, Homo sapiens
CAKVRSSVRDFDAFDIW

SEQ ID NO: 40859 - protein, 19 aa, Homo sapiens
CARWGGTGSTMANDAFDIW

SEQ ID NO: 40860 - protein, 20 aa, Homo sapiens
CARDNRQWLRLRGTIAFDIW

SEQ ID NO: 40861 - protein, 17 aa, Homo sapiens
CARDRDHYYDSSGIDYW

SEQ ID NO: 40862 - protein, 16 aa, Homo sapiens
CARRRAVLIGEAFDIW

SEQ ID NO: 40863 - protein, 17 aa, Homo sapiens
CALYPRGYYGADAFDVW

SEQ ID NO: 40864 - protein, 20 aa, Homo sapiens
CASLYGSGSYLRYYYYMDVW

SEQ ID NO: 40865 - protein, 23 aa, Homo sapiens
CAKGNSHYYGWGSYYPPSNIDYW

SEQ ID NO: 40866 - protein, 24 aa, Homo sapiens
CARDRGVTIFGVVINPYYYGMDVW

SEQ ID NO: 40867 - protein, 16 aa, Homo sapiens
CATEHRSSWYEGFDYW

SEQ ID NO: 40868 - protein, 19 aa, Homo sapiens
CARGRYSRQLVTRYYFDYW

SEQ ID NO: 40869 - protein, 21 aa, Homo sapiens
CALGGGYGSGSYMGLDAFDIW

SEQ ID NO: 40870 - protein, 18 aa, Homo sapiens
CARDWADGWAQRGEFDYW

SEQ ID NO: 40871 - protein, 10 aa, Homo sapiens [sequence omitted]

SEQ ID NO: 40872 - protein, 14 aa, Homo sapiens
CSGGSCYTDYFDYW

SEQ ID NO: 40873 - protein, 25 aa, Homo sapiens
CARRRGFEELTIFGVVITAYPFDYW

SEQ ID NO: 40874 - protein, 22 aa, Homo sapiens
CAKDKPRRSSHWYSPLSAFDIW

SEQ ID NO: 40875 - protein, 14 aa, Homo sapiens
CVQRRISAAVIDYW

SEQ ID NO: 40876 - protein, 21 aa, Homo sapiens
CARLLQYYDFWSGYYHYFDYW

SEQ ID NO: 40877 - protein, 16 aa, Homo sapiens
CARDRIAAAGTGFDYW

SEQ ID NO: 40878 - protein, 24 aa, Homo sapiens
CARDTLLAPGLLWFGELFNAFDIW

SEQ ID NO: 40879 - protein, 18 aa, Homo sapiens
CARDVTYYGYSSGFFDSW

SEQ ID NO: 40880 - protein, 21 aa, Homo sapiens
CAKATVSSDCSDNNCYCFGYW

SEQ ID NO: 40881 - protein, 17 aa, Homo sapiens
CARDIKALTGDHAFDVW

SEQ ID NO: 40882 - protein, 15 aa, Homo sapiens
CAKDMRYYGSAFDYW

SEQ ID NO: 40883 - protein, 11 aa, Homo sapiens
CQQRGNWSCSF

SEQ ID NO: 40884 - protein, 23 aa, Homo sapiens
CARDGGGEITFGGVIVEYYFDYW

SEQ ID NO: 40885 - protein, 18 aa, Homo sapiens
CTRWHRFTVTMLWYFDLW

SEQ ID NO: 40886 - protein, 23 aa, Homo sapiens
CAKDLGERTSSGWYYYYYGMDVW

SEQ ID NO: 40887 - protein, 17 aa, Homo sapiens
CARVPVRFLEWLYFDYW

SEQ ID NO: 40888 - protein, 17 aa, Homo sapiens
CARVGYDYVWGNLFDYW

SEQ ID NO: 40889 - protein, 14 aa, Homo sapiens
CQSYDSSLHGSEIF

SEQ ID NO: 40890 - protein, 24 aa, Homo sapiens
CARHPLRRITLIVVVEGKDAFDIW

SEQ ID NO: 40891 - protein, 17 aa, Homo sapiens
CARSGGHYYYYNAMDVW

SEQ ID NO: 40892 - protein, 20 aa, Homo sapiens
CTTDKSGYDILTGYYRIDYW

SEQ ID NO: 40893 - protein, 21 aa, Homo sapiens
CARAGHYDYVWGSFNDAFDIW

SEQ ID NO: 40894 - protein, 21 aa, Homo sapiens
CARANLDYYGSGSYYRAFDIW

SEQ ID NO: 40895 - protein, 25 aa, Homo sapiens
CARHPLKSPFIVVVTATAQSAFDIW

SEQ ID NO: 40896 - protein, 20 aa, Homo sapiens
CARRRREWLVRDKVWYFDLW

SEQ ID NO: 40897 - protein, 16 aa, Homo sapiens
CAKGSGYGYSVPFDYW

SEQ ID NO: 40898 - protein, 25 aa, Homo sapiens
CARGYTVGILWFGEPLPGYDAFDIW

SEQ ID NO: 40899 - protein, 20 aa, Homo sapiens
CARVNDYYDSGKYPNWFDPW

SEQ ID NO: 40900 - protein, 17 aa, Homo sapiens
CARGVEAVAGIGYFQHW

SEQ ID NO: 40901 - protein, 12 aa, Homo sapiens
CQQYYGTLTWAF

SEQ ID NO: 40902 - protein, 22 aa, Homo sapiens
CARAPIGGFLEWLETGGAFYIW

SEQ ID NO: 40903 - protein, 19 aa, Homo sapiens
CAHRLRYSSNWNSGYFDPW

SEQ ID NO: 40904 - protein, 16 aa, Homo sapiens
CARGLNNWNTNWFDPW

SEQ ID NO: 40905 - protein, 23 aa, Homo sapiens
CANPSLLGYCSGGSCLTNQFDYW

SEQ ID NO: 40906 - protein, 14 aa, Homo sapiens
CARHPPRVRGFDIW

SEQ ID NO: 40907 - protein, 19 aa, Homo sapiens
CAKCYDSSGYSPSENFQHW

SEQ ID NO: 40908 - protein, 14 aa, Homo sapiens
CARETKWLRIIDYW

SEQ ID NO: 40909 - protein, 19 aa, Homo sapiens
CARDLYDILTGHPFALDIW

SEQ ID NO: 40910 - protein, 13 aa, Homo sapiens
CTRTSGYWYFDVW

SEQ ID NO: 40911 - protein, 16 aa, Homo sapiens
CAHRQVAVADPYFDYW

SEQ ID NO: 40912 - protein, 23 aa, Homo sapiens
CARSESRNNVLLWLKAGDYFDYW

SEQ ID NO: 40913 - protein, 17 aa, Homo sapiens
CARDIRYFEWLTSPDYW

SEQ ID NO: 40914 - protein, 18 aa, Homo sapiens
CAKDRFSGIAAPTYFDLW

SEQ ID NO: 40915 - protein, 22 aa, Homo sapiens
CATSRDSGSGNYYNEPHAFDIW

SEQ ID NO: 40916 - protein, 24 aa, Homo sapiens
CARDPGRDLGYSSGWYFGDYMDVW

SEQ ID NO: 40917 - protein, 14 aa, Homo sapiens
CATEAGPVGHFDFW

SEQ ID NO: 40918 - protein, 17 aa, Homo sapiens
CAKPRRSYGINDAFDIW

SEQ ID NO: 40919 - protein, 22 aa, Homo sapiens
CARDREGYGSGSYMFSYYFDYW

SEQ ID NO: 40920 - protein, 24 aa, Homo sapiens
CAKDILSGSRSGYYPYYYYGMDVW

SEQ ID NO: 40921 - protein, 22 aa, Homo sapiens
CARRRGYCSSTSCSVPNFFDYW

SEQ ID NO: 40922 - protein, 23 aa, Homo sapiens
CARLSLGDYVWGSYRPENGFDPW

SEQ ID NO: 40923 - protein, 18 aa, Homo sapiens
CARDSDPGYSNGLFFDYW

SEQ ID NO: 40924 - protein, 19 aa, Homo sapiens
CARPPGDYGDPPYWYFDLW

SEQ ID NO: 40925 - protein, 17 aa, Homo sapiens
CTTPALGYSGYDPFDYW

SEQ ID NO: 40926 - protein, 19 aa, Homo sapiens
CARAYFDWLLGGNRAFDIW

SEQ ID NO: 40927 - protein, 14 aa, Homo sapiens
CATRANGWYAFDIW

SEQ ID NO: 40928 - protein, 21 aa, Homo sapiens
CARDPGGSYFLVGDRPLFDYW

SEQ ID NO: 40929 - protein, 17 aa, Homo sapiens
CARHSFGSGWLEKLDYW

SEQ ID NO: 40930 - protein, 17 aa, Homo sapiens
CAHRRWIQLWIDYFDYW

SEQ ID NO: 40931 - protein, 19 aa, Homo sapiens
CAHVRGFTYGYYFFYFDYW

SEQ ID NO: 40932 - protein, 18 aa, Homo sapiens
CASSSSWYGESVGAFDYW

SEQ ID NO: 40933 - protein, 13 aa, Homo sapiens
CATTIAVSGHDYW

SEQ ID NO: 40934 - protein, 20 aa, Homo sapiens
CARALRGSTTWSRAYYFDYW

SEQ ID NO: 40935 - protein, 17 aa, Homo sapiens
CAKDSDGYTAYDYFNSW

SEQ ID NO: 40936 - protein, 23 aa, Homo sapiens
CARGEGGLLWFGEPYYYYGMDVW

SEQ ID NO: 40937 - protein, 16 aa, Homo sapiens
CARLSSGSGLGMFDPW

SEQ ID NO: 40938 - protein, 17 aa, Homo sapiens
CVGAGWQLVDRGAFDVW

SEQ ID NO: 40939 - protein, 22 aa, Homo sapiens
CARDRHEYYYGSGSPWGPFDIW

SEQ ID NO: 40940 - protein, 23 aa, Homo sapiens
CARVEKGYAFFTIFEVVNAFDIW

SEQ ID NO: 40941 - protein, 22 aa, Homo sapiens
CARVFLYFSMARGVINDAFDIW

SEQ ID NO: 40942 - protein, 15 aa, Homo sapiens
CAREGRGDPDAFDIW

SEQ ID NO: 40943 - protein, 13 aa, Homo sapiens
CARTQEDTCFDYW

SEQ ID NO: 40944 - protein, 23 aa, Homo sapiens
CAHANIVYYYGSGSYYTDWFDPW

SEQ ID NO: 40945 - protein, 17 aa, Homo sapiens
CARDQGKFSGYAPFDYW

SEQ ID NO: 40946 - protein, 17 aa, Homo sapiens
CARDRVVVPAKNAFDIW

SEQ ID NO: 40947 - protein, 19 aa, Homo sapiens
CARIKQQLGQPRDYYFDYW

SEQ ID NO: 40948 - protein, 21 aa, Homo sapiens
CARQDPYYYGSGSYSEDFDYW

SEQ ID NO: 40949 - protein, 22 aa, Homo sapiens
CARDQGYSSSWPIYYYYYMDVW

SEQ ID NO: 40950 - protein, 14 aa, Homo sapiens
CTRARAYHDNPDYW

SEQ ID NO: 40951 - protein, 14 aa, Homo sapiens
CARATTYSSSYDYW

SEQ ID NO: 40952 - protein, 24 aa, Homo sapiens
CTRLTEAKIQLWLAGYYYYYMDVW

SEQ ID NO: 40953 - protein, 17 aa, Homo sapiens
CAKDTRQNDYGDYFDFW

SEQ ID NO: 40954 - protein, 21 aa, Homo sapiens
CARHDYQQLGHLSRRDAFDIW

SEQ ID NO: 40955 - protein, 17 aa, Homo sapiens
CARVSGDYARFDAFDIW

SEQ ID NO: 40956 - protein, 10 aa, Homo sapiens
CQQFNNLVTF

SEQ ID NO: 40957 - protein, 17 aa, Homo sapiens
CAKDMAYSSSWHLFDYW

SEQ ID NO: 40958 - protein, 17 aa, Homo sapiens
CTKDRYCSSVTCPLDYW

SEQ ID NO: 40959 - protein, 14 aa, Homo sapiens
CQSYDNSLRGWGFF

SEQ ID NO: 40960 - protein, 19 aa, Homo sapiens
CAKDHSTGYLQWLEYFDYW

SEQ ID NO: 40961 - protein, 24 aa, Homo sapiens
CARFVIMAYYYGSGRRQFDAFDIW

SEQ ID NO: 40962 - protein, 17 aa, Homo sapiens
CARLAVAGTLTEAFDIW

SEQ ID NO: 40963 - protein, 19 aa, Homo sapiens
CARGEQYYGELFFGAFDHW

SEQ ID NO: 40964 - protein, 17 aa, Homo sapiens
CARLRMNGYDFDAFDIW

SEQ ID NO: 40965 - protein, 22 aa, Homo sapiens
CARELTGGSSGRRIESEAFDIW

SEQ ID NO: 40966 - protein, 17 aa, Homo sapiens
CTTRWGYASGSFRDDYW

SEQ ID NO: 40967 - protein, 22 aa, Homo sapiens
CAKTTQRQWLVRYYYYYGMDVW

SEQ ID NO: 40968 - protein, 15 aa, Homo sapiens
CARDRVGEVTTLDYW

SEQ ID NO: 40969 - protein, 19 aa, Homo sapiens
CAKAPNYYGSETVGYFDYW

SEQ ID NO: 40970 - protein, 16 aa, Homo sapiens
CARVGTDILTSPFDFW

SEQ ID NO: 40971 - protein, 16 aa, Homo sapiens
CAHSQFEILTGPFDYW

SEQ ID NO: 40972 - protein, 18 aa, Homo sapiens
CAKDPRSWYGLTNWFDPW

SEQ ID NO: 40973 - protein, 16 aa, Homo sapiens
CVREYTTGWYNYFDPW

SEQ ID NO: 40974 - protein, 18 aa, Homo sapiens
CAGGITIFGVVIGPVDYW

SEQ ID NO: 40975 - protein, 22 aa, Homo sapiens
CARIHYYDNEVGFYYYYGMDVW

SEQ ID NO: 40976 - protein, 17 aa, Homo sapiens
CARDDDSSGCQYYFDYW

SEQ ID NO: 40977 - protein, 14 aa, Homo sapiens
CATTTSYYYGMDVW

SEQ ID NO: 40978 - protein, 12 aa, Homo sapiens
CAVSRSVTVDYW

SEQ ID NO: 40979 - protein, 22 aa, Homo sapiens
CAKDKFPRIVGARDEYNWFDPW

SEQ ID NO: 40980 - protein, 22 aa, Homo sapiens
CAKDHGGGYDLVYYYYYYMDVW

SEQ ID NO: 40981 - protein, 22 aa, Homo sapiens
CAHSGTYYDILTGYLTGAFDIW

SEQ ID NO: 40982 - protein, 18 aa, Homo sapiens
CARDRAHDYGGNSMFDYW

SEQ ID NO: 40983 - protein, 18 aa, Homo sapiens
CARAALSAAVDGNWFDPW

SEQ ID NO: 40984 - protein, 19 aa, Homo sapiens
CARDHMIVVVTYYYGMDVW

SEQ ID NO: 40985 - protein, 22 aa, Homo sapiens
CAREDYYYGSGSYYPSQPLDYW

SEQ ID NO: 40986 - protein, 14 aa, Homo sapiens
CARVGVLLYAFDIW

SEQ ID NO: 40987 - protein, 16 aa, Homo sapiens
CARFLRLRVAWYFDLW

SEQ ID NO: 40988 - protein, 17 aa, Homo sapiens
CARAGVRDPTYWYFDLW

SEQ ID NO: 40989 - protein, 16 aa, Homo sapiens
CAKGTVHKGGVLSDYW

SEQ ID NO: 40990 - protein, 21 aa, Homo sapiens
CARDLHYYESGNYYPGGFDYW

SEQ ID NO: 40991 - protein, 22 aa, Homo sapiens
CARETTLGKHSRLWPLVAFDIW

SEQ ID NO: 40992 - protein, 12 aa, Homo sapiens
CSSYTSIGTLAF

SEQ ID NO: 40993 - protein, 17 aa, Homo sapiens
CARVPTGLSWEPPFDYW

SEQ ID NO: 40994 - protein, 18 aa, Homo sapiens
CARVAHLWFGEHHAFDIW

SEQ ID NO: 40995 - protein, 17 aa, Homo sapiens
CARDLEMAHQARELDYW

SEQ ID NO: 40996 - protein, 13 aa, Homo sapiens
CARTILGAPFDSW

SEQ ID NO: 40997 - protein, 18 aa, Homo sapiens
CATIEAVHGGWYTWFDPW

SEQ ID NO: 40998 - protein, 25 aa, Homo sapiens
CAREGLEDLLLWFGELLSGGWFDPW

SEQ ID NO: 40999 - protein, 19 aa, Homo sapiens
CTTGQWLVRLYYYYYMDVW

SEQ ID NO: 41000 - protein, 16 aa, Homo sapiens
CAREHMAAESEAFDIW

SEQ ID NO: 41001 - protein, 14 aa, Homo sapiens
CASYLTINDAFDIW

SEQ ID NO: 41002 - protein, 24 aa, Homo sapiens
CAHRRVAGAIFYYDSSAFDAFDIW

SEQ ID NO: 41003 - protein, 13 aa, Homo sapiens
CAKSQMVGWFDPW

SEQ ID NO: 41004 - protein, 20 aa, Homo sapiens
CARRGYCSSTSCPVDAFDIW

SEQ ID NO: 41005 - protein, 16 aa, Homo sapiens
CTSLTYYDSSRYSDYW

SEQ ID NO: 41006 - protein, 21 aa, Homo sapiens
CATGIILVRGNYRGKYYFDYW

SEQ ID NO: 41007 - protein, 19 aa, Homo sapiens
CARHWEQWLVRWWGNFDYW

SEQ ID NO: 41008 - protein, 17 aa, Homo sapiens
CAREVNIAVAGSGFDYW

SEQ ID NO: 41009 - protein, 14 aa, Homo sapiens
CASQDALAASLDYW

SEQ ID NO: 41010 - protein, 19 aa, Homo sapiens
CAKASSSWYQKGFGAFDIW

SEQ ID NO: 41011 - protein, 18 aa, Homo sapiens
CLRRLWFGESKNWNFDLW

SEQ ID NO: 41012 - protein, 25 aa, Homo sapiens
CARDPHYDILTGYYIRSRSDGFDYW

SEQ ID NO: 41013 - protein, 17 aa, Homo sapiens
CARPSLRYFDKGAFEIW

SEQ ID NO: 41014 - protein, 21 aa, Homo sapiens
CARYFRTFGSSYYYYYGMDVW

SEQ ID NO: 41015 - protein, 15 aa, Homo sapiens
CARPQGLGELFFDYW

SEQ ID NO: 41016 - protein, 22 aa, Homo sapiens
CAKVQAPYCSGGSCYSWYFDYW

SEQ ID NO: 41017 - protein, 19 aa, Homo sapiens
CARRLYSSSWRTGDEFDLW

SEQ ID NO: 41018 - protein, 15 aa, Homo sapiens
CAKDPSWYFLFGDYW

SEQ ID NO: 41019 - protein, 17 aa, Homo sapiens
CARGPCNNTNCYGFDFW

SEQ ID NO: 41020 - protein, 27 aa, Homo sapiens
CARDLAPKTTIFGVVMGPQRSGYFDYW

SEQ ID NO: 41021 - protein, 16 aa, Homo sapiens
CARVNDSSGNDAFDIW

SEQ ID NO: 41022 - protein, 16 aa, Homo sapiens
CAHRPKGWTGGYFDYW

SEQ ID NO: 41023 - protein, 17 aa, Homo sapiens
CARLASSMVRGVAFDPW

SEQ ID NO: 41024 - protein, 20 aa, Homo sapiens
CARAKTTFGGIIVQYYFDYW

SEQ ID NO: 41025 - protein, 16 aa, Homo sapiens
CARHGAVATTKYFQVW

SEQ ID NO: 41026 - protein, 24 aa, Homo sapiens
CAREPVVVNYYVSGSYYDNWFDPW

SEQ ID NO: 41027 - protein, 16 aa, Homo sapiens
CARDIRGHAYGDTDYW

SEQ ID NO: 41028 - protein, 19 aa, Homo sapiens
CAHKAGEQWLLRRGAFDIW

SEQ ID NO: 41029 - protein, 23 aa, Homo sapiens
CARHWGWEVVLMVYATNNWFDPW

SEQ ID NO: 41030 - protein, 25 aa, Homo sapiens
CAKSSGMEQWLPNPARYYYYYMDVW

SEQ ID NO: 41031 - protein, 17 aa, Homo sapiens
CAKDRSPRIAVAAFDYW

SEQ ID NO: 41032 - protein, 17 aa, Homo sapiens
CARGLLTFGELYIIDYW

SEQ ID NO: 41033 - protein, 23 aa, Homo sapiens
CARRYCSGGSCYPGRVMDAFDIW

SEQ ID NO: 41034 - protein, 26 aa, Homo sapiens
CARDSVGSRTYCSGGSDCYYYYMDVW

SEQ ID NO: 41035 - protein, 23 aa, Homo sapiens
CAPRGVYCSSTSCRPKYNWFDPW

SEQ ID NO: 41036 - protein, 16 aa, Homo sapiens
CARGVSSWFSYWFDPW

SEQ ID NO: 41037 - protein, 14 aa, Homo sapiens
CASYTTSSTLLYVF

SEQ ID NO: 41038 - protein, 20 aa, Homo sapiens
CARDADYHSRGSDYDALDLW

SEQ ID NO: 41039 - protein, 20 aa, Homo sapiens
CALQGFYDSSGYYHREFDYW

SEQ ID NO: 41040 - protein, 17 aa, Homo sapiens
CARQKAGPIAVAGLDYW

SEQ ID NO: 41041 - protein, 20 aa, Homo sapiens
CARAKPIAYYDILTGELDYW

SEQ ID NO: 41042 - protein, 18 aa, Homo sapiens
CARDLGVRGETAMAFDYW

SEQ ID NO: 41043 - protein, 18 aa, Homo sapiens
CARATKQWLGVVGWFDPW

SEQ ID NO: 41044 - protein, 25 aa, Homo sapiens
CARSYRPYCSGGSCYLSQKPLLDYW

SEQ ID NO: 41045 - protein, 19 aa, Homo sapiens
CASGRHIGRYYQFYYFDYW

SEQ ID NO: 41046 - protein, 15 aa, Homo sapiens
CARGKGSPVEGFDYW

SEQ ID NO: 41047 - protein, 18 aa, Homo sapiens
CATGGWIRGYYYYYMDVW

SEQ ID NO: 41048 - protein, 15 aa, Homo sapiens
CARRDGTGYYFFDYW

SEQ ID NO: 41049 - protein, 16 aa, Homo sapiens
CATIASGSYRGALDIW

SEQ ID NO: 41050 - protein, 16 aa, Homo sapiens
CAKTPYYGSGSYWDYW

SEQ ID NO: 41051 - protein, 14 aa, Homo sapiens
CARSQYYGDALDYW

SEQ ID NO: 41052 - protein, 14 aa, Homo sapiens
CAKDHSSGWSSDYW

SEQ ID NO: 41053 - protein, 18 aa, Homo sapiens
CAKFIRGRGVIIGYFDLW

SEQ ID NO: 41054 - protein, 26 aa, Homo sapiens
CARGKLLWFGESLVPRSYYYYYMDVW

SEQ ID NO: 41055 - protein, 23 aa, Homo sapiens
CARHMNTITGTTFVYYYYGIDVW

SEQ ID NO: 41056 - protein, 19 aa, Homo sapiens
CAKDSSSWLPGVYNWFDPW

SEQ ID NO: 41057 - protein, 17 aa, Homo sapiens
CAKDIRFNSGPDAFDIW

SEQ ID NO: 41058 - protein, 11 aa, Homo sapiens
CARHVHYFLNW

SEQ ID NO: 41059 - protein, 15 aa, Homo sapiens
CAKVSEYYDKAFDIW

SEQ ID NO: 41060 - protein, 21 aa, Homo sapiens
CAKALYYDPPIYYYYYGMDVW

SEQ ID NO: 41061 - protein, 18 aa, Homo sapiens
CARDFGFRGDLSYYFDYW

SEQ ID NO: 41062 - protein, 20 aa, Homo sapiens
CAKNGQKEIAVAGNRPFDYW

SEQ ID NO: 41063 - protein, 26 aa, Homo sapiens
CARVAPESVLRYFDWSAMGIYYFDYW

SEQ ID NO: 41064 - protein, 20 aa, Homo sapiens
CARGKRGSLIRGLPNWFDSW

SEQ ID NO: 41065 - protein, 20 aa, Homo sapiens
CARDWEGSSSWYPSYYFDYW

SEQ ID NO: 41066 - protein, 24 aa, Homo sapiens
CARDPDYYDSSGYYSKAGDAFDIW

SEQ ID NO: 41067 - protein, 15 aa, Homo sapiens
CAPAYSSGWYYLDYW

SEQ ID NO: 41068 - protein, 21 aa, Homo sapiens
CAIEGGGYDRYYYYYYYMDVW

SEQ ID NO: 41069 - protein, 16 aa, Homo sapiens
CLREDASSENWYWVYW

SEQ ID NO: 41070 - protein, 20 aa, Homo sapiens
CASRRGEVLLVRVLQYFDYW

SEQ ID NO: 41071 - protein, 20 aa, Homo sapiens
CARPRGIAAAAGTHSYCDYW

SEQ ID NO: 41072 - protein, 23 aa, Homo sapiens
CARQATSDDYVWGSNRPRAFDYW

SEQ ID NO: 41073 - protein, 22 aa, Homo sapiens
CARHQFYDSSGYYLRYNWFDPW

SEQ ID NO: 41074 - protein, 18 aa, Homo sapiens
CARGHATSRWWSGAFDVW

SEQ ID NO: 41075 - protein, 15 aa, Homo sapiens
CARDGGASGQDLDYW

SEQ ID NO: 41076 - protein, 23 aa, Homo sapiens
CARDYWSRNPMYYYDSSGYLDYW

SEQ ID NO: 41077 - protein, 16 aa, Homo sapiens
CAKDPPSRGYFYFDLW

SEQ ID NO: 41078 - protein, 21 aa, Homo sapiens
CARGYYDSSAYSPYYYGMDVW

SEQ ID NO: 41079 - protein, 29 aa, Homo sapiens
CARLGARLETTHRRYDYGDYGVYWYFDLW

SEQ ID NO: 41080 - protein, 20 aa, Homo sapiens
CARILGSYGYGAKAGAFDIW

SEQ ID NO: 41081 - protein, 24 aa, Homo sapiens
CARLTLSPDYHDSSDYYYQWFDPW

SEQ ID NO: 41082 - protein, 22 aa, Homo sapiens
CAKDRCSSTSCYRYYYYGMDVW

SEQ ID NO: 41083 - protein, 22 aa, Homo sapiens
CARNPLKGVVLAYYYYYGMDVW

SEQ ID NO: 41084 - protein, 18 aa, Homo sapiens
CAVEDIYGSGYAGFFDYW

SEQ ID NO: 41085 - protein, 20 aa, Homo sapiens
CARYPHYYDSSGTSGAFDIW

SEQ ID NO: 41086 - protein, 20 aa, Homo sapiens
CASHLPPRFLEWFYPHFDYW

SEQ ID NO: 41087 - protein, 19 aa, Homo sapiens
CARASGIAAAVRRGTFDIW

SEQ ID NO: 41088 - protein, 20 aa, Homo sapiens
CAHRGSGGWYLYWENWFDPW

SEQ ID NO: 41089 - protein, 17 aa, Homo sapiens
CVKHYYDSGTYPPFDFW

SEQ ID NO: 41090 - protein, 16 aa, Homo sapiens
CARDVRQWLVPFIDYW

SEQ ID NO: 41091 - protein, 18 aa, Homo sapiens
CARGPITIFGVVTHHDYW

SEQ ID NO: 41092 - protein, 14 aa, Homo sapiens
CARYDQVQDWFDPW

SEQ ID NO: 41093 - protein, 16 aa, Homo sapiens
CAKDSLQFARNWFDPW

SEQ ID NO: 41094 - protein, 17 aa, Homo sapiens
CASGESGYFKNGAFDIW

SEQ ID NO: 41095 - protein, 19 aa, Homo sapiens
CARDSWPSYYYGSGSYDYW

SEQ ID NO: 41096 - protein, 16 aa, Homo sapiens
CAKDGGSGWYEAWDYW

SEQ ID NO: 41097 - protein, 23 aa, Homo sapiens
CARGQPWVRFLEWLFSLDAFDIW

SEQ ID NO: 41098 - protein, 21 aa, Homo sapiens
CARDPYSNYVYYYYYYGMDVW

SEQ ID NO: 41099 - protein, 18 aa, Homo sapiens
CARAAVFRYVDWAGFDSW

SEQ ID NO: 41100 - protein, 16 aa, Homo sapiens
CAKVLEYSSSSAFDYW

SEQ ID NO: 41101 - protein, 22 aa, Homo sapiens
CARDSRGTDWLSHYYYYYMDVW

SEQ ID NO: 41102 - protein, 14 aa, Homo sapiens
CARPALGGYFFDYW

SEQ ID NO: 41103 - protein, 15 aa, Homo sapiens
CARTRYSTRQKYDYW

SEQ ID NO: 41104 - protein, 22 aa, Homo sapiens
CARGAGYGSGWDAIRKYYFDFW

SEQ ID NO: 41105 - protein, 25 aa, Homo sapiens
CARGIPPKVPAAIRRWDYYYYMDVW

SEQ ID NO: 41106 - protein, 22 aa, Homo sapiens
CARDRALRYFEWLHTADGFDIW

SEQ ID NO: 41107 - protein, 22 aa, Homo sapiens
CARGLSYKVSWYSSKIGAFDIW

SEQ ID NO: 41108 - protein, 21 aa, Homo sapiens
CARGYDYVWGSYRYTDHFDYW

SEQ ID NO: 41109 - protein, 17 aa, Homo sapiens
CAKGHRPRDGYTPFDYW

SEQ ID NO: 41110 - protein, 16 aa, Homo sapiens
CARPNMVGGISAFDIW

SEQ ID NO: 41111 - protein, 19 aa, Homo sapiens
CARSSDLLTTVTKNYFDQW

SEQ ID NO: 41112 - protein, 17 aa, Homo sapiens
CLNRRVEMVGDPLFDYW

SEQ ID NO: 41113 - protein, 20 aa, Homo sapiens
CASEVVAAGGRLYVYAFDIW

SEQ ID NO: 41114 - protein, 21 aa, Homo sapiens
CARDAGPDILTGYDGTKFDVW

SEQ ID NO: 41115 - protein, 18 aa, Homo sapiens
CAKVLNSGIWEVAAFDIW

SEQ ID NO: 41116 - protein, 25 aa, Homo sapiens
CARDALRSYYYGSGSYFGYYGMDVW

SEQ ID NO: 41117 - protein, 25 aa, Homo sapiens
CARERSGILGYCSGGNCYSDAFDIW

SEQ ID NO: 41118 - protein, 21 aa, Homo sapiens
CTREAVVDSRGVRRNDAFDFW

SEQ ID NO: 41119 - protein, 18 aa, Homo sapiens
CAREGWRSSSVPDAFDIW

SEQ ID NO: 41120 - protein, 16 aa, Homo sapiens
CAKDHQTFTVTTPDYW

SEQ ID NO: 41121 - protein, 21 aa, Homo sapiens
CAKDRLPSFITMVRGQNFDYW

SEQ ID NO: 41122 - protein, 19 aa, Homo sapiens
CARVTDPYYYGSGSALDYW

SEQ ID NO: 41123 - protein, 15 aa, Homo sapiens
CAREWLMEGYSFDYW

SEQ ID NO: 41124 - protein, 16 aa, Homo sapiens
CARIGYNYGYYSFDYW

SEQ ID NO: 41125 - protein, 19 aa, Homo sapiens
CARHLGALLWFGPGCFDPW

SEQ ID NO: 41126 - protein, 16 aa, Homo sapiens
CARMGWAAAWGSFDYW

SEQ ID NO: 41127 - protein, 18 aa, Homo sapiens
CARSYCSGGSCLLSEDYW

SEQ ID NO: 41128 - protein, 34 aa, Homo sapiens
CALPILRSEDTAMYFCARALVSFAELTDSAFDYW

SEQ ID NO: 41129 - protein, 15 aa, Homo sapiens
CARLSSSWRDGFDYW

SEQ ID NO: 41130 - protein, 17 aa, Homo sapiens
CARDLMHRISAAGIDYW

SEQ ID NO: 41131 - protein, 17 aa, Homo sapiens
CARGLVVVAAGDAFDIW

SEQ ID NO: 41132 - protein, 18 aa, Homo sapiens
CACDIVVVVAANGGCDYW

SEQ ID NO: 41133 - protein, 18 aa, Homo sapiens
CAKDGYSSSFYFWYLDLW

SEQ ID NO: 41134 - protein, 19 aa, Homo sapiens
CARDGYSSGWYVYHYFDYW

SEQ ID NO: 41135 - protein, 15 aa, Homo sapiens
CARDPTGYSSTIDYW

SEQ ID NO: 41136 - protein, 16 aa, Homo sapiens
CARDSLISVPGRLDYW

SEQ ID NO: 41137 - protein, 18 aa, Homo sapiens
CARVPLNVLLWFGDVDYW

SEQ ID NO: 41138 - protein, 20 aa, Homo sapiens
CARDPRQWLAPNPYWYFDLW

SEQ ID NO: 41139 - protein, 19 aa, Homo sapiens
CARLDSRWFGAALDAFDIW

SEQ ID NO: 41140 - protein, 19 aa, Homo sapiens
CARDLRQQLGNYFYYMDVW

SEQ ID NO: 41141 - protein, 19 aa, Homo sapiens
CARGSGSTWLYYYYYMDVW

SEQ ID NO: 41142 - protein, 16 aa, Homo sapiens
CAHRRGGINTAYFDYW

SEQ ID NO: 41143 - protein, 15 aa, Homo sapiens
CVRSEGSGWYYFDYW

SEQ ID NO: 41144 - protein, 22 aa, Homo sapiens
CARGRFIPYRRTVVVIGTFDYW

SEQ ID NO: 41145 - protein, 14 aa, Homo sapiens
CARENSTSFFFDYW

SEQ ID NO: 41146 - protein, 24 aa, Homo sapiens
CARERPGTYCGGDCGSWPDAFDIW

SEQ ID NO: 41147 - protein, 18 aa, Homo sapiens
CARRGYDILTGDRAFDVW

SEQ ID NO: 41148 - protein, 19 aa, Homo sapiens
CAKSPPFGFVSSGYYFDYW

SEQ ID NO: 41149 - protein, 18 aa, Homo sapiens
CARERGDDGDHVRYFDLW

SEQ ID NO: 41150 - protein, 21 aa, Homo sapiens
CARVGGYCSGGSCYSRLFDYW

SEQ ID NO: 41151 - protein, 19 aa, Homo sapiens
CAKDPYYGDYVMLYYFDYW

SEQ ID NO: 41152 - protein, 15 aa, Homo sapiens
CARAPILHGDAFDIW

SEQ ID NO: 41153 - protein, 13 aa, Homo sapiens
CARDLVVDGMDVW

SEQ ID NO: 41154 - protein, 18 aa, Homo sapiens
CARDSSQLWSEKDVFDIW

SEQ ID NO: 41155 - protein, 15 aa, Homo sapiens
CAKDRSQLWSYFDYW

SEQ ID NO: 41156 - protein, 20 aa, Homo sapiens
CARDRGVVEYSYGNWYFDLW

SEQ ID NO: 41157 - protein, 19 aa, Homo sapiens
CARTSYDILTGYYWGFDPW

SEQ ID NO: 41158 - protein, 17 aa, Homo sapiens
CARAVGAAGVIYYFDSW

SEQ ID NO: 41159 - protein, 20 aa, Homo sapiens
CARVTHQVRDFDWFLYFDSW

SEQ ID NO: 41160 - protein, 22 aa, Homo sapiens
CARSSLRAYGSGWYAPTLFDYW

SEQ ID NO: 41161 - protein, 15 aa, Homo sapiens
CAKGGEGRWFLFDYW

SEQ ID NO: 41162 - protein, 20 aa, Homo sapiens
CARDWPDYGSGSYPGPFDYW

SEQ ID NO: 41163 - protein, 19 aa, Homo sapiens
CARDAVTIYSPKTGSPDYW

SEQ ID NO: 41164 - protein, 15 aa, Homo sapiens
CARILPGFYNWFDPW

SEQ ID NO: 41165 - protein, 18 aa, Homo sapiens
CARSGGGWLPSQDVFDIW

SEQ ID NO: 41166 - protein, 23 aa, Homo sapiens
CARALRYFDWSGPGAQTDAFDIW

SEQ ID NO: 41167 - protein, 20 aa, Homo sapiens
CAREVVDIVATMGRDAFDIW

SEQ ID NO: 41168 - protein, 14 aa, Homo sapiens
CANLEGIPRYFQSW

SEQ ID NO: 41169 - protein, 16 aa, Homo sapiens
CARDALWVGELFFDYW

SEQ ID NO: 41170 - protein, 16 aa, Homo sapiens
CARDSSIAARRWFDPW

SEQ ID NO: 41171 - protein, 19 aa, Homo sapiens
CARHFHCDGASCFSIFDYW

SEQ ID NO: 41172 - protein, 15 aa, Homo sapiens
CARPVAAKGDALDIW

SEQ ID NO: 41173 - protein, 23 aa, Homo sapiens
CAKDIPLRYCSGGSCYLGAFDIW

SEQ ID NO: 41174 - protein, 18 aa, Homo sapiens
CARQSSSDSYTGGLLDYW

SEQ ID NO: 41175 - protein, 15 aa, Homo sapiens
CARVMTGTDNWSDPW

SEQ ID NO: 41176 - protein, 17 aa, Homo sapiens
CATSPGRTTTVPIFDYW

SEQ ID NO: 41177 - protein, 22 aa, Homo sapiens
CARADSSYYLRDFRAHAAFEVW

SEQ ID NO: 41178 - protein, 18 aa, Homo sapiens
CAKEVEVTRGYYYYMDVW

SEQ ID NO: 41179 - protein, 15 aa, Homo sapiens
CARWWGSGSYSSDYW

SEQ ID NO: 41180 - protein, 22 aa, Homo sapiens
CAKLFRGILFIGGSGDPGFDYW

SEQ ID NO: 41181 - protein, 23 aa, Homo sapiens
CAKDRDSSSWYVFWAGLRALDYW

SEQ ID NO: 41182 - protein, 22 aa, Homo sapiens
CAHSSPYYYGSGSYYPYYFDYW

SEQ ID NO: 41183 - protein, 16 aa, Homo sapiens
CARPMTTVSTDPFDMW

SEQ ID NO: 41184 - protein, 18 aa, Homo sapiens
CARGKLDNVVVVGVNDYW

SEQ ID NO: 41185 - protein, 11 aa, Homo sapiens
CSGGDFAFDFW

SEQ ID NO: 41186 - protein, 14 aa, Homo sapiens
CATLVSATTYFDYW

SEQ ID NO: 41187 - protein, 16 aa, Homo sapiens
CAKSRSSSGTYYPDYW

SEQ ID NO: 41188 - protein, 16 aa, Homo sapiens
CAKEGWLRIDWYFDLW

SEQ ID NO: 41189 - protein, 13 aa, Homo sapiens
CAKGHVTVNFDQW

SEQ ID NO: 41190 - protein, 22 aa, Homo sapiens
CARDQYVGYCSSTSCYDAFDIW

SEQ ID NO: 41191 - protein, 14 aa, Homo sapiens
CAADGPPSNAMDVW

SEQ ID NO: 41192 - protein, 25 aa, Homo sapiens
CARTRAGGVLRYFDWLLTSGYWSYW

SEQ ID NO: 41193 - protein, 18 aa, Homo sapiens
CAKGAHYGLIGIDYFDYW

SEQ ID NO: 41194 - protein, 18 aa, Homo sapiens
CARDLDLAHGLRAWFDPW

SEQ ID NO: 41195 - protein, 13 aa, Homo sapiens
CAKDRAFMDFDYW

SEQ ID NO: 41196 - protein, 16 aa, Homo sapiens
CARHLWLGPSCNFDFW

SEQ ID NO: 41197 - protein, 16 aa, Homo sapiens
CARGILRGYSYGFGYW

SEQ ID NO: 41198 - protein, 17 aa, Homo sapiens
CAAPGGLLTVPDAFDIW

SEQ ID NO: 41199 - protein, 16 aa, Homo sapiens
CARMGVPGYGGNYDYW

SEQ ID NO: 41200 - protein, 13 aa, Homo sapiens
CARVFGPNWFDPW

SEQ ID NO: 41201 - protein, 27 aa, Homo sapiens
CARGRPRRRVTYYYDSSGERSWYFDLW

SEQ ID NO: 41202 - protein, 17 aa, Homo sapiens
CTRGGRLRQWLIPYDYW

SEQ ID NO: 41203 - protein, 19 aa, Homo sapiens
CARALRNLWQWLVRPADYW

SEQ ID NO: 41204 - protein, 22 aa, Homo sapiens
CAKDIMAAPVLGATTSGPFDMW

SEQ ID NO: 41205 - protein, 14 aa, Homo sapiens
CATQWLDRYYFDFW

SEQ ID NO: 41206 - protein, 14 aa, Homo sapiens
CQAPDSGTAVFYVF

SEQ ID NO: 41207 - protein, 27 aa, Homo sapiens
CAGGRNYYDSSGIANPNPKSTAPFDYW

SEQ ID NO: 41208 - protein, 19 aa, Homo sapiens
CAKGNGFGSGSYRGWFDPW

SEQ ID NO: 41209 - protein, 17 aa, Homo sapiens
CARAIMVRGPGMAFDIW

SEQ ID NO: 41210 - protein, 17 aa, Homo sapiens
CAKDIGSHWFGEHFDSW

SEQ ID NO: 41211 - protein, 16 aa, Homo sapiens
CAKEGSGSYWGSFDSW

SEQ ID NO: 41212 - protein, 19 aa, Homo sapiens
CARHDYYGSGSYDYYFDYW

SEQ ID NO: 41213 - protein, 18 aa, Homo sapiens
CAKDGVQFNSQWDWLDPW

SEQ ID NO: 41214 - protein, 23 aa, Homo sapiens
CARLPGYCSSTSCYAPPPIFDYW

SEQ ID NO: 41215 - protein, 17 aa, Homo sapiens
CVKAGIQGWLKDAFDIW

SEQ ID NO: 41216 - protein, 15 aa, Homo sapiens
CARRRPMNSGWYDYW

SEQ ID NO: 41217 - protein, 22 aa, Homo sapiens
CARRTGIYNISTGLSPYYFDYW

SEQ ID NO: 41218 - protein, 11 aa, Homo sapiens [sequence omitted]

SEQ ID NO: 41219 - protein, 23 aa, Homo sapiens
CAREIRGKVLLWFGDRSPWFDPW

SEQ ID NO: 41220 - protein, 20 aa, Homo sapiens
CARDHLFEVSPYSGKPLDYW

SEQ ID NO: 41221 - protein, 19 aa, Homo sapiens
CAKVGPDYYDSSGYNFDYW

SEQ ID NO: 41222 - protein, 21 aa, Homo sapiens
CAKDPFHTARGYSYGPYFDYW

SEQ ID NO: 41223 - protein, 16 aa, Homo sapiens
CARGYGAGTRNWFNPW

SEQ ID NO: 41224 - protein, 12 aa, Homo sapiens
CARSVVALPDYW

SEQ ID NO: 41225 - protein, 20 aa, Homo sapiens
CARGYSIGWPIMYYYYMDVW

SEQ ID NO: 41226 - protein, 18 aa, Homo sapiens
CARGPRATVTTLGWFDPW

SEQ ID NO: 41227 - protein, 17 aa, Homo sapiens
CARDSVPAVQSGWFDPW

SEQ ID NO: 41228 - protein, 18 aa, Homo sapiens
CARDLVPTVAGPRWFDPW

SEQ ID NO: 41229 - protein, 17 aa, Homo sapiens
CTARLWFGELATPFDYW

SEQ ID NO: 41230 - protein, 16 aa, Homo sapiens
CARRNGWLHYNWFDPW

SEQ ID NO: 41231 - protein, 22 aa, Homo sapiens
CAREGAHPYSSSWFATYYFDYW

SEQ ID NO: 41232 - protein, 15 aa, Homo sapiens
CARNFYFDSIYFDYW

SEQ ID NO: 41233 - protein, 16 aa, Homo sapiens
CARDRSSSWGRYFDLW

SEQ ID NO: 41234 - protein, 19 aa, Homo sapiens
CARVRGDYPNGAAEYLQYW

SEQ ID NO: 41235 - protein, 16 aa, Homo sapiens
CAKVGDGYNLGAFDIW

SEQ ID NO: 41236 - protein, 17 aa, Homo sapiens
CAKARYFDWLSPPFDYW

SEQ ID NO: 41237 - protein, 16 aa, Homo sapiens
CAKSRDTLSLWYFDLW

SEQ ID NO: 41238 - protein, 17 aa, Homo sapiens
CATTRFGELLYSPFDYW

SEQ ID NO: 41239 - protein, 14 aa, Homo sapiens
CARGGSDGNYFEDW

SEQ ID NO: 41240 - protein, 20 aa, Homo sapiens
CVKDMNYGEGPYYSYGMDVW

SEQ ID NO: 41241 - protein, 14 aa, Homo sapiens
CARDWGWNHVIDYW

SEQ ID NO: 41242 - protein, 17 aa, Homo sapiens
CAKDYSGWWFGWYFDLW

SEQ ID NO: 41243 - protein, 16 aa, Homo sapiens
CAAGYSSGWYRYFQHW

SEQ ID NO: 41244 - protein, 12 aa, Homo sapiens
CVRNFDWAFDKW

SEQ ID NO: 41245 - protein, 18 aa, Homo sapiens
CAKDGVAGIMAPHYFDYW

SEQ ID NO: 41246 - protein, 21 aa, Homo sapiens
CARGGGGSFGHLFYFYYFDYW

SEQ ID NO: 41247 - protein, 14 aa, Homo sapiens
CTTIPLGRVYVDCW

SEQ ID NO: 41248 - protein, 27 aa, Homo sapiens
CARDGAYYDYVWGSYLSYYYYYYMDVW

SEQ ID NO: 41249 - protein, 22 aa, Homo sapiens
CARLHPPMITFGGVTYGYFDYW

SEQ ID NO: 41250 - protein, 17 aa, Homo sapiens
CARSGSSSSLHWYFDLW

SEQ ID NO: 41251 - protein, 16 aa, Homo sapiens
CARIDIAARRKAFDYW

SEQ ID NO: 41252 - protein, 13 aa, Homo sapiens
CARLSWDRTIDYW

SEQ ID NO: 41253 - protein, 18 aa, Homo sapiens
CARIPGFCGHDCRYFDFW

SEQ ID NO: 41254 - protein, 21 aa, Homo sapiens
CAREGWPLLITGTESDAFDIW

SEQ ID NO: 41255 - protein, 18 aa, Homo sapiens
CTRAIPDGDSPFLGFDYW

SEQ ID NO: 41256 - protein, 16 aa, Homo sapiens
CAKFPDTLSMARLDYW

SEQ ID NO: 41257 - protein, 17 aa, Homo sapiens
CAKDIGSGYWWDGFDIW

SEQ ID NO: 41258 - protein, 18 aa, Homo sapiens
CARDPRIAAAGTGWFDPW

SEQ ID NO: 41259 - protein, 22 aa, Homo sapiens
CARGPREYSYTYGYYYYGLDVW

SEQ ID NO: 41260 - protein, 20 aa, Homo sapiens
CARGSSSWILFGYYDAFDIW

SEQ ID NO: 41261 - protein, 21 aa, Homo sapiens
CARDPDPRLALTARSGGQDYW

SEQ ID NO: 41262 - protein, 21 aa, Homo sapiens
CARDTNDYGDQTYYYFGMDVW

SEQ ID NO: 41263 - protein, 21 aa, Homo sapiens
CARTPTAYCGGDCYPETIDYW

SEQ ID NO: 41264 - protein, 24 aa, Homo sapiens
CARGGTYYDFWSGYYNYYYGMDVW

SEQ ID NO: 41265 - protein, 18 aa, Homo sapiens
CARESPVYGDYPYYFDYW

SEQ ID NO: 41266 - protein, 15 aa, Homo sapiens
CARDNENSGASFDYW

SEQ ID NO: 41267 - protein, 19 aa, Homo sapiens
CAKDQNTYTVTGTNWFDPW

SEQ ID NO: 41268 - protein, 22 aa, Homo sapiens
CTRIGEMVVQGESFYYRAMDVW

SEQ ID NO: 41269 - protein, 18 aa, Homo sapiens
CARGTPAWQPHNYFFDYW

SEQ ID NO: 41270 - protein, 16 aa, Homo sapiens
CARAGYYGSDIHFDYW

SEQ ID NO: 41271 - protein, 18 aa, Homo sapiens
CARGGGKTYDSSGYWPYW

SEQ ID NO: 41272 - protein, 20 aa, Homo sapiens
CARGRSGILWFGELRPFDYW

SEQ ID NO: 41273 - protein, 20 aa, Homo sapiens
CARVLDTTMLYYSWYYMDVW

SEQ ID NO: 41274 - protein, 16 aa, Homo sapiens
CAIELRYFDWNYMDVW

SEQ ID NO: 41275 - protein, 17 aa, Homo sapiens
CAKDTTVTTFVGWFDPW

SEQ ID NO: 41276 - protein, 20 aa, Homo sapiens
CARDRDPGYYGSGLNAFDIW

SEQ ID NO: 41277 - protein, 19 aa, Homo sapiens
CAKIGHGHWYGDYVGNDYW

SEQ ID NO: 41278 - protein, 27 aa, Homo sapiens
CARAIRPRWWGGFGELLSIEHDAFDIW

SEQ ID NO: 41279 - protein, 17 aa, Homo sapiens
CTRVIPHGGNSLVFDYW

SEQ ID NO: 41280 - protein, 13 aa, Homo sapiens
CVHREAVTGFDHW

SEQ ID NO: 41281 - protein, 24 aa, Homo sapiens
CARGRKKDIVVVVARYYYYYMDVW

SEQ ID NO: 41282 - protein, 15 aa, Homo sapiens
CVKDESGWLFNFDNW

SEQ ID NO: 41283 - protein, 11 aa, Homo sapiens
CTRRKSGYDYW

SEQ ID NO: 41284 - protein, 27 aa, Homo sapiens
CARDALPSYYDILTGYYRFVSDAFDIW

SEQ ID NO: 41285 - protein, 17 aa, Homo sapiens
CAHRYCSGGSCLKFDYW

SEQ ID NO: 41286 - protein, 20 aa, Homo sapiens
CATYRPGIAVAGPTRAFDFW

SEQ ID NO: 41287 - protein, 21 aa, Homo sapiens
CARPGTYDILTGYSHWYFDLW

SEQ ID NO: 41288 - protein, 19 aa, Homo sapiens
CARDRDSSSFSLGPDFDRW

SEQ ID NO: 41289 - protein, 16 aa, Homo sapiens
CARGGLWFGEMYFQHW

SEQ ID NO: 41290 - protein, 25 aa, Homo sapiens
CARVKTTMVREIVSNYHYYYYMDVW

SEQ ID NO: 41291 - protein, 14 aa, Homo sapiens
CASCYARTYAFDIW

SEQ ID NO: 41292 - protein, 10 aa, Homo sapiens [sequence omitted]

SEQ ID NO: 41293 - protein, 16 aa, Homo sapiens
CYVTDDYGDYTLFDYW

SEQ ID NO: 41294 - protein, 24 aa, Homo sapiens
CARKERTVTMVRGVIGSTYYFDYW

SEQ ID NO: 41295 - protein, 22 aa, Homo sapiens
CARRGIGPSGWSLKGSFHFDYW

SEQ ID NO: 41296 - protein, 19 aa, Homo sapiens
CARHDYGDYPAKYWYFDLW

SEQ ID NO: 41297 - protein, 19 aa, Homo sapiens
CAHSAWTIATAGTLRFDIW

SEQ ID NO: 41298 - protein, 21 aa, Homo sapiens
CARPLRYCSGGSCYSHAFDIW

SEQ ID NO: 41299 - protein, 20 aa, Homo sapiens
CARSEVVSATNYYYYAMDVW

SEQ ID NO: 41300 - protein, 17 aa, Homo sapiens
CAKVPSSGGSYGLFDYW

SEQ ID NO: 41301 - protein, 16 aa, Homo sapiens
CARAGYQLLSWYFDYW

SEQ ID NO: 41302 - protein, 20 aa, Homo sapiens
CARGDRGVIIMYQYYYMDVW

SEQ ID NO: 41303 - protein, 11 aa, Homo sapiens
CFILYNWFDPW

SEQ ID NO: 41304 - protein, 27 aa, Homo sapiens
CASPPAQPHPRGTSGWYRSYYYGMDVW

SEQ ID NO: 41305 - protein, 19 aa, Homo sapiens
CARGAITMIVVELHYFDYW

SEQ ID NO: 41306 - protein, 17 aa, Homo sapiens
CAKDSSSSWWYNWFDPW

SEQ ID NO: 41307 - protein, 19 aa, Homo sapiens
CARGGWYDSSGYYYGIDYW

SEQ ID NO: 41308 - protein, 18 aa, Homo sapiens
CATGSVYSSSWSDAFDIW

SEQ ID NO: 41309 - protein, 14 aa, Homo sapiens
CAIYDSSGYSFDYW

SEQ ID NO: 41310 - protein, 11 aa, Homo sapiens [sequence omitted]

SEQ ID NO: 41311 - protein, 19 aa, Homo sapiens
CARGYHFLTGHWNDAFYIW

SEQ ID NO: 41312 - protein, 22 aa, Homo sapiens
CAREPPPDIVVVPAADWWFDPW

SEQ ID NO: 41313 - protein, 19 aa, Homo sapiens
CARDLSIVGLSIGGSLDYW

SEQ ID NO: 41314 - protein, 18 aa, Homo sapiens
CARDYVATHGQNDAFDIW

SEQ ID NO: 41315 - protein, 19 aa, Homo sapiens
CARVLGNGSGSFFFYMDVW

SEQ ID NO: 41316 - protein, 12 aa, Homo sapiens
CARDQFAFLDYW

SEQ ID NO: 41317 - protein, 23 aa, Homo sapiens
CARVEASCGGDCYLPHYWYFDLW

SEQ ID NO: 41318 - protein, 16 aa, Homo sapiens
CARSVTMIRGVIGDYW

SEQ ID NO: 41319 - protein, 20 aa, Homo sapiens
CAHRRPLYYYGSGSSPFDYW

SEQ ID NO: 41320 - protein, 16 aa, Homo sapiens
CARRVGGLSVDAFEIW

SEQ ID NO: 41321 - protein, 21 aa, Homo sapiens
CAKSRDGYVYNSAKYVAFDIW

SEQ ID NO: 41322 - protein, 16 aa, Homo sapiens
CAGMGSTGYSDALDIW

SEQ ID NO: 41323 - protein, 19 aa, Homo sapiens
CARQLLWFGEVIRDYMDVW

SEQ ID NO: 41324 - protein, 15 aa, Homo sapiens
CATGKPAAGIYFDYW

SEQ ID NO: 41325 - protein, 21 aa, Homo sapiens
CARVGYWTVAGPRPLGAFDIW

SEQ ID NO: 41326 - protein, 21 aa, Homo sapiens
CARDPHGDYLHYYYYYGMDVW

SEQ ID NO: 41327 - protein, 20 aa, Homo sapiens
CAKAETQSAHYYYYYYMDVW

SEQ ID NO: 41328 - protein, 15 aa, Homo sapiens
CARSIRLGDKDFDYW

SEQ ID NO: 41329 - protein, 19 aa, Homo sapiens
CARHRLDYGGGNLFFSDYW

SEQ ID NO: 41330 - protein, 20 aa, Homo sapiens
CAKDSGDIQLWLQNPCFDPW

SEQ ID NO: 41331 - protein, 15 aa, Homo sapiens
CARHGWYPHDVFDIW

SEQ ID NO: 41332 - protein, 14 aa, Homo sapiens
CATEIGYISTFDYW

SEQ ID NO: 41333 - protein, 18 aa, Homo sapiens
CAKDSLESYYDSSGLDYW

SEQ ID NO: 41334 - protein, 17 aa, Homo sapiens
CARVTGGWPRHTWFDPW

SEQ ID NO: 41335 - protein, 17 aa, Homo sapiens
CARLNPGPRGGYYTDYW

SEQ ID NO: 41336 - protein, 21 aa, Homo sapiens
CARDLLGVPMAGTFPAAFDTW

SEQ ID NO: 41337 - protein, 19 aa, Homo sapiens
CARVPITDYGDPRGYFDYW

SEQ ID NO: 41338 - protein, 17 aa, Homo sapiens
CARDRYSGYDSWYFDLW

SEQ ID NO: 41339 - protein, 20 aa, Homo sapiens
CARLYCGGDCYSVNWYFDLW

SEQ ID NO: 41340 - protein, 24 aa, Homo sapiens
CASKTTYYYDSSGYLPPAEYFQHW

SEQ ID NO: 41341 - protein, 16 aa, Homo sapiens
CARIRSAVAGMPSDYW

SEQ ID NO: 41342 - protein, 20 aa, Homo sapiens
CTKDGPWGIVGPYMYYFDFW

SEQ ID NO: 41343 - protein, 22 aa, Homo sapiens
CARDQRSLRYFDWPHLDAFDIW

SEQ ID NO: 41344 - protein, 18 aa, Homo sapiens
CARDPYYDFLPGASFDYW

SEQ ID NO: 41345 - protein, 18 aa, Homo sapiens
CAKANHGSGSYYDPTDYW

SEQ ID NO: 41346 - protein, 22 aa, Homo sapiens
CAKDISIPVDTAMAWEGAFDIW

SEQ ID NO: 41347 - protein, 17 aa, Homo sapiens
CARPATITPSNWYFDLW

SEQ ID NO: 41348 - protein, 18 aa, Homo sapiens
CVREGVDSGFYKRAFDIW

SEQ ID NO: 41349 - protein, 18 aa, Homo sapiens
CSAWDDSLNGRLKGHMIF

SEQ ID NO: 41350 - protein, 19 aa, Homo sapiens
CAKSLYGDYFGVGVAFDIW

SEQ ID NO: 41351 - protein, 23 aa, Homo sapiens
CGRAEGRISLRYFEWLFHAFDMW

SEQ ID NO: 41352 - protein, 18 aa, Homo sapiens
CARSKGYGDYVIDAFDIW

SEQ ID NO: 41353 - protein, 16 aa, Homo sapiens
CARMKNDWFGSSLDYW

SEQ ID NO: 41354 - protein, 18 aa, Homo sapiens
CARGGYSAYGLYDAFHIW

SEQ ID NO: 41355 - protein, 12 aa, Homo sapiens
CARADYGAMDYW

SEQ ID NO: 41356 - protein, 18 aa, Homo sapiens
CASFDYSSILSLSWFDPW

SEQ ID NO: 41357 - protein, 17 aa, Homo sapiens
CAHTLTMIPQDMVFDYW

SEQ ID NO: 41358 - protein, 16 aa, Homo sapiens
CSKGLSGSYYYAFDIW

SEQ ID NO: 41359 - protein, 16 aa, Homo sapiens
CAKDLGYYWGSYGDYW

SEQ ID NO: 41360 - protein, 14 aa, Homo sapiens
CARDTSWNDYGDYW

SEQ ID NO: 41361 - protein, 22 aa, Homo sapiens
CAREGGTPKIVLVIPQYYLDFW

SEQ ID NO: 41362 - protein, 17 aa, Homo sapiens
CAKVVRGVISLGSFDYW

SEQ ID NO: 41363 - protein, 17 aa, Homo sapiens
CAREPYSGDWLVIFDYW

SEQ ID NO: 41364 - protein, 18 aa, Homo sapiens
CARSYNSGTFYEYYFDYW

SEQ ID NO: 41365 - protein, 23 aa, Homo sapiens
CARIAPSYYDTSDYYPDLRFDYW

SEQ ID NO: 41366 - protein, 23 aa, Homo sapiens
CAKDTGYILTGLFPPPTDAFDIW

SEQ ID NO: 41367 - protein, 20 aa, Homo sapiens
CARDCDEYGDPIRYWYFDLW

SEQ ID NO: 41368 - protein, 14 aa, Homo sapiens
CAHSAQRDWYFDLW

SEQ ID NO: 41369 - protein, 15 aa, Homo sapiens
CARDVQLVRDIWDYW

SEQ ID NO: 41370 - protein, 18 aa, Homo sapiens
CAHRPAGQQPIMNYFDYW

SEQ ID NO: 41371 - protein, 13 aa, Homo sapiens
CARAPSGSYNDYW

SEQ ID NO: 41372 - protein, 22 aa, Homo sapiens
CARLAPYLLRNFEWTNGAFDIW

SEQ ID NO: 41373 - protein, 18 aa, Homo sapiens
CLYRRGFISVTWNYVDFW

SEQ ID NO: 41374 - protein, 17 aa, Homo sapiens
CARALSSVSGGSCVDYW

SEQ ID NO: 41375 - protein, 12 aa, Homo sapiens
CAKDNGGSYDYW

SEQ ID NO: 41376 - protein, 19 aa, Homo sapiens
CARDKPLGLFNVRGYIDVW

SEQ ID NO: 41377 - protein, 15 aa, Homo sapiens
CAKTPADWSWAFDIW

SEQ ID NO: 41378 - protein, 14 aa, Homo sapiens
CHSRDNSGNHLRLF

SEQ ID NO: 41379 - protein, 18 aa, Homo sapiens
CASDSGSYYSILYYFDNW

SEQ ID NO: 41380 - protein, 14 aa, Homo sapiens
CAKASGTPGFMDYW

SEQ ID NO: 41381 - protein, 14 aa, Homo sapiens
CARGIVVLNALDVW

SEQ ID NO: 41382 - protein, 17 aa, Homo sapiens
CARDFGDSVVRGVFDDW

SEQ ID NO: 41383 - protein, 22 aa, Homo sapiens
CARDWNIVVVPAAMVSGAFDIW

SEQ ID NO: 41384 - protein, 21 aa, Homo sapiens
CARRALGYCSGGRCYAGFDPW

SEQ ID NO: 41385 - protein, 12 aa, Homo sapiens
CVIYMGGGIWVF

SEQ ID NO: 41386 - protein, 15 aa, Homo sapiens
CAHSRAELTWGFDVW

SEQ ID NO: 41387 - protein, 18 aa, Homo sapiens
CARGKGYCSSTSCYVDYW

SEQ ID NO: 41388 - protein, 17 aa, Homo sapiens
CTRRGEGSGSPDPFDYW

SEQ ID NO: 41389 - protein, 17 aa, Homo sapiens
CARGEGILATINAFDIW

SEQ ID NO: 41390 - protein, 17 aa, Homo sapiens
CARASKTSGWIYAFDIW

SEQ ID NO: 41391 - protein, 18 aa, Homo sapiens
CARGRYSSSWVNWYFDLW

SEQ ID NO: 41392 - protein, 21 aa, Homo sapiens
CARSGEAHSSSGLQTNAFDFW

SEQ ID NO: 41393 - protein, 23 aa, Homo sapiens
CTTETYGSGGPPHYYYYYYMDVW

SEQ ID NO: 41394 - protein, 12 aa, Homo sapiens
CQQFDSFSGHTF

SEQ ID NO: 41395 - protein, 18 aa, Homo sapiens
CARHSEGFGWLFDAFDIW

SEQ ID NO: 41396 - protein, 23 aa, Homo sapiens
CARGWRYYDFWSGYYIGNYFDYW

SEQ ID NO: 41397 - protein, 20 aa, Homo sapiens
CTSQNGYCSGGSCSFYFDYW

SEQ ID NO: 41398 - protein, 18 aa, Homo sapiens
CAKDRIWGIVAVAGPDYW

SEQ ID NO: 41399 - protein, 14 aa, Homo sapiens
CAGFWSGPLGDDYW

SEQ ID NO: 41400 - protein, 18 aa, Homo sapiens
CAKDSRGYSYGKTHFDYW

SEQ ID NO: 41401 - protein, 22 aa, Homo sapiens
CARVGGIRYFDWLPPGPYFDYW

SEQ ID NO: 41402 - protein, 18 aa, Homo sapiens
CAKPVRGVISIFNAFDIW

SEQ ID NO: 41403 - protein, 18 aa, Homo sapiens
CARIVVSGVGRRDAFDIW

SEQ ID NO: 41404 - protein, 19 aa, Homo sapiens
CAKGVHYDYVWGSWPLDYW

SEQ ID NO: 41405 - protein, 19 aa, Homo sapiens
CAAVRGGRIADPSRRFDPW

SEQ ID NO: 41406 - protein, 20 aa, Homo sapiens
CANDIRDIGSRNWFGWFDPW

SEQ ID NO: 41407 - protein, 23 aa, Homo sapiens
CARTRKCGDCYPNYYYYYGMDVW

SEQ ID NO: 41408 - protein, 15 aa, Homo sapiens
CARDRDYSGSRFDYW

SEQ ID NO: 41409 - protein, 23 aa, Homo sapiens
CARMAVGGSLGPRSYYYYGMDVW

SEQ ID NO: 41410 - protein, 15 aa, Homo sapiens [sequence omitted]

SEQ ID NO: 41411 - protein, 13 aa, Homo sapiens
CAIWSTGEMLDYW

SEQ ID NO: 41412 - protein, 18 aa, Homo sapiens
CAKDVVWGIVGATYFDYW

SEQ ID NO: 41413 - protein, 18 aa, Homo sapiens
CSKGGGVYGSGLLRWDYW

SEQ ID NO: 41414 - protein, 17 aa, Homo sapiens
CAKASPYYYYYYYMDVW

SEQ ID NO: 41415 - protein, 16 aa, Homo sapiens
CAKPGFDWLLMSFDYW

SEQ ID NO: 41416 - protein, 14 aa, Homo sapiens
CAKEEGKLLPFDHW

SEQ ID NO: 41417 - protein, 18 aa, Homo sapiens
CARTYGSGSIWDDPIDIW

SEQ ID NO: 41418 - protein, 17 aa, Homo sapiens
CGRLVHKYSSSWYVNYW

SEQ ID NO: 41419 - protein, 22 aa, Homo sapiens
CAKDSPHIYYDFWSDGYYFDYW

SEQ ID NO: 41420 - protein, 14 aa, Homo sapiens
CQSADSSGTRSWLF

SEQ ID NO: 41421 - protein, 16 aa, Homo sapiens
CAKSRSGHSYGYFDYW

SEQ ID NO: 41422 - protein, 16 aa, Homo sapiens
CAKDKYSGDPSTFDYW

SEQ ID NO: 41423 - protein, 23 aa, Homo sapiens
CARDKGNNGYSHRPYYYYAMDVW

SEQ ID NO: 41424 - protein, 16 aa, Homo sapiens
CATRYKSGSDRSFDLW

SEQ ID NO: 41425 - protein, 16 aa, Homo sapiens
CARILGYDILTGYDYW

SEQ ID NO: 41426 - protein, 17 aa, Homo sapiens
CARPRDGYNFLDAFDIW

SEQ ID NO: 41427 - protein, 17 aa, Homo sapiens
CARVQDLMIEGLGFDYW

SEQ ID NO: 41428 - protein, 19 aa, Homo sapiens
CAKYMKEMATITNGVFDYW

SEQ ID NO: 41429 - protein, 19 aa, Homo sapiens
CARAGGRYSGYDTYYFDYW

SEQ ID NO: 41430 - protein, 20 aa, Homo sapiens
CARISRSSNWSLQVGFFDYW

SEQ ID NO: 41431 - protein, 11 aa, Homo sapiens
CSRGLALRDYW

SEQ ID NO: 41432 - protein, 19 aa, Homo sapiens
CAKDVSRSYYASGSYFDHW

SEQ ID NO: 41433 - protein, 15 aa, Homo sapiens
CAKAPYSSSWYFDYW

SEQ ID NO: 41434 - protein, 19 aa, Homo sapiens
CAKDMVRGVIMSPSGFVYW

SEQ ID NO: 41435 - protein, 20 aa, Homo sapiens
CARLSSGWEIYYYYYYMDVW

SEQ ID NO: 41436 - protein, 19 aa, Homo sapiens
CARGRSWSSWYKVNWFDPW

SEQ ID NO: 41437 - protein, 19 aa, Homo sapiens
CARIMYYDSVWGGNWFDSW

SEQ ID NO: 41438 - protein, 20 aa, Homo sapiens
CARLIWNYYGSENRWYFDLW

SEQ ID NO: 41439 - protein, 14 aa, Homo sapiens
CALLRLATDAFDIW

SEQ ID NO: 41440 - protein, 16 aa, Homo sapiens
CVKGRDFTIAYYFEYW

SEQ ID NO: 41441 - protein, 17 aa, Homo sapiens
CARDAYKRSSIDYFDSW

SEQ ID NO: 41442 - protein, 18 aa, Homo sapiens
CAKDPITMVRGVNRVDYW

SEQ ID NO: 41443 - protein, 18 aa, Homo sapiens
CARSRGWSLYYYFGMDVW

SEQ ID NO: 41444 - protein, 17 aa, Homo sapiens
CAKRITIFGVVTAFDYW

SEQ ID NO: 41445 - protein, 20 aa, Homo sapiens
CARERGPMTPYHSYYGMDVW

SEQ ID NO: 41446 - protein, 17 aa, Homo sapiens
CASSYYDFWSGYGFDYW

SEQ ID NO: 41447 - protein, 22 aa, Homo sapiens
CARDGNSWFGESPGGNYYFDSW

SEQ ID NO: 41448 - protein, 18 aa, Homo sapiens
CARDLYWPTVTSRAFDIW

SEQ ID NO: 41449 - protein, 19 aa, Homo sapiens
CARHGNILTGYYGMWFDPW

SEQ ID NO: 41450 - protein, 16 aa, Homo sapiens
CAKVRYSAIYYGPDYW

SEQ ID NO: 41451 - protein, 19 aa, Homo sapiens
CARGNVDILVPGSDAFDLW

SEQ ID NO: 41452 - protein, 18 aa, Homo sapiens
CARESTDILTGYNPFDYW

SEQ ID NO: 41453 - protein, 29 aa, Homo sapiens
CVRSSKYYYDSSGYYYLSAGYYYYGMDVW

SEQ ID NO: 41454 - protein, 14 aa, Homo sapiens
CARDTAMVVVFDIW

SEQ ID NO: 41455 - protein, 16 aa, Homo sapiens
CARGYRGGWYFPFDSW

SEQ ID NO: 41456 - protein, 15 aa, Homo sapiens
CASLIAAAGSGFDYW

SEQ ID NO: 41457 - protein, 21 aa, Homo sapiens
CAKDIIGFIAVAGTRGAFDIW

SEQ ID NO: 41458 - protein, 18 aa, Homo sapiens
CASTPGYSNTWGRYFDYW

SEQ ID NO: 41459 - protein, 16 aa, Homo sapiens
CTTGLSGYNSGPTDYW

SEQ ID NO: 41460 - protein, 20 aa, Homo sapiens
CAKARRFGYSYGLADAFDIW

SEQ ID NO: 41461 - protein, 21 aa, Homo sapiens
CARDLALGSWWGRMYDAFDIW

SEQ ID NO: 41462 - protein, 24 aa, Homo sapiens
CARGRGLVVVAATVYRYYYGMDVW

SEQ ID NO: 41463 - protein, 16 aa, Homo sapiens
CAKGLYRMATTDFDDW

SEQ ID NO: 41464 - protein, 18 aa, Homo sapiens
CAKGALGIQLWTPLIDYW

SEQ ID NO: 41465 - protein, 22 aa, Homo sapiens
CARGGELWFGDLTAPGNWFDPW

SEQ ID NO: 41466 - protein, 15 aa, Homo sapiens
CAGQRGYGWSWFDPW

SEQ ID NO: 41467 - protein, 21 aa, Homo sapiens
CARDKALYYDSIFRDDAFDIW

SEQ ID NO: 41468 - protein, 17 aa, Homo sapiens
CARHVRLEQWLAPSDYW

SEQ ID NO: 41469 - protein, 16 aa, Homo sapiens
CAKDKVDWLSPDFDYW

SEQ ID NO: 41470 - protein, 15 aa, Homo sapiens
CQQYDNDDLLPMYTF

SEQ ID NO: 41471 - protein, 16 aa, Homo sapiens
CAKDRWGYSSGWIDYW

SEQ ID NO: 41472 - protein, 17 aa, Homo sapiens
CARDRVVGATLNYFDYW

SEQ ID NO: 41473 - protein, 20 aa, Homo sapiens
CAKDPNPYSSGWYSHYFDYW

SEQ ID NO: 41474 - protein, 19 aa, Homo sapiens
CARAFRHGVYYYYYGMDVW

SEQ ID NO: 41475 - protein, 21 aa, Homo sapiens
CASSGYCSGGGCSDTGEIDYW

SEQ ID NO: 41476 - protein, 19 aa, Homo sapiens
CARGATYSSSWYSCAFDIW

SEQ ID NO: 41477 - protein, 20 aa, Homo sapiens
CARDPISSWQFLGNWYFDLW

SEQ ID NO: 41478 - protein, 17 aa, Homo sapiens
CASEKDYVQNWYNFDSW

SEQ ID NO: 41479 - protein, 20 aa, Homo sapiens
CTTTYPYYDSSGYNWDFDYW

SEQ ID NO: 41480 - protein, 19 aa, Homo sapiens
CARDQHYYGSGSSNWFDPW

SEQ ID NO: 41481 - protein, 21 aa, Homo sapiens
CARDHQAGIAAAVWFGAFDIW

SEQ ID NO: 41482 - protein, 15 aa, Homo sapiens
CARESGDGYRAIDYW

SEQ ID NO: 41483 - protein, 17 aa, Homo sapiens
CARGSLLRYFDWLSDYW

SEQ ID NO: 41484 - protein, 15 aa, Homo sapiens
CARGYRPPPLHFDYW

SEQ ID NO: 41485 - protein, 19 aa, Homo sapiens
CARDKEPKWAAGTDAFDIW

SEQ ID NO: 41486 - protein, 17 aa, Homo sapiens
CATMVRGVIMYGAFDYW

SEQ ID NO: 41487 - protein, 18 aa, Homo sapiens
CVRPSWGDPPHDDAFEIW

SEQ ID NO: 41488 - protein, 13 aa, Homo sapiens
CATKIYRPCFDYW

SEQ ID NO: 41489 - protein, 14 aa, Homo sapiens
CQQRSNRPPVMCSF

SEQ ID NO: 41490 - protein, 23 aa, Homo sapiens
CAKEHPDCSGGKCFSDEHAFHIW

SEQ ID NO: 41491 - protein, 22 aa, Homo sapiens
CARGRIVLLWFGESQGNWFDPW

SEQ ID NO: 41492 - protein, 17 aa, Homo sapiens
CVKDIGVDSCSVAFSYW

SEQ ID NO: 41493 - protein, 16 aa, Homo sapiens
CASYTVLTLVRAFDIW

SEQ ID NO: 41494 - protein, 22 aa, Homo sapiens
CARRCRVQGSGTYYKERYFDLW

SEQ ID NO: 41495 - protein, 20 aa, Homo sapiens
CARDHYDYVWGSYRYTFRYW

SEQ ID NO: 41496 - protein, 17 aa, Homo sapiens
CARGSLRKDTVAPFDYW

SEQ ID NO: 41497 - protein, 21 aa, Homo sapiens
CARILSYCSGGSRNADAFDMW

SEQ ID NO: 41498 - protein, 19 aa, Homo sapiens
CASHPTYYYDSSGSYFDYW

SEQ ID NO: 41499 - protein, 23 aa, Homo sapiens
CARVDYGSGSYYNEPKNDAFDIW

SEQ ID NO: 41500 - protein, 15 aa, Homo sapiens
CARPKMVRDGSFDYW

SEQ ID NO: 41501 - protein, 17 aa, Homo sapiens
CAAGTYYYGSGSYFSYW

SEQ ID NO: 41502 - protein, 22 aa, Homo sapiens
CARSRMMKTYYDILTGPYFDYW

SEQ ID NO: 41503 - protein, 19 aa, Homo sapiens
CARENHNYGSGSPYAFDLW

SEQ ID NO: 41504 - protein, 14 aa, Homo sapiens
CARDRGYSYAPDVW

SEQ ID NO: 41505 - protein, 20 aa, Homo sapiens
CARAATSGMIVVVITSFDYW

SEQ ID NO: 41506 - protein, 15 aa, Homo sapiens
CARVPTMKTGYFDVW

SEQ ID NO: 41507 - protein, 18 aa, Homo sapiens
CARDDVLGEQWLDAFDLW

SEQ ID NO: 41508 - protein, 23 aa, Homo sapiens
CTTDTGWRWFGELFTGVAAFDIW

SEQ ID NO: 41509 - protein, 20 aa, Homo sapiens
CARLTYSSGWSGRDHSIDYW

SEQ ID NO: 41510 - protein, 20 aa, Homo sapiens
CARRVGCSGGSCYVDWFDPW

SEQ ID NO: 41511 - protein, 23 aa, Homo sapiens
CARASHPGVLWFGELSLHYMDVW

SEQ ID NO: 41512 - protein, 30 aa, Homo sapiens
CARETPYSGYDFDWAGLSGAVAGGYYFDYW

SEQ ID NO: 41513 - protein, 21 aa, Homo sapiens
CARDKRGELWQNYYYYGMDVW

SEQ ID NO: 41514 - protein, 24 aa, Homo sapiens
CARVSIVAAAGTLWLDYYYYMDVW

SEQ ID NO: 41515 - protein, 15 aa, Homo sapiens
CARARGNYGDSFDYW

SEQ ID NO: 41516 - protein, 18 aa, Homo sapiens
CARHGTFYYSGPGSFDSW

SEQ ID NO: 41517 - protein, 20 aa, Homo sapiens
CARGVVFSRSWDDYWYFDLW

SEQ ID NO: 41518 - protein, 25 aa, Homo sapiens
CARAQVVLTKVFPWLDHQPNAFDMW

SEQ ID NO: 41519 - protein, 25 aa, Homo sapiens
CARTFVARLETSGWYSIDRDAFDIW

SEQ ID NO: 41520 - protein, 18 aa, Homo sapiens
CARGVSFRGVISSHFDYW

SEQ ID NO: 41521 - protein, 17 aa, Homo sapiens
CAKLRVAPLARGAFDIW

SEQ ID NO: 41522 - protein, 18 aa, Homo sapiens
CAKAYSSSWYVKVFLDYW

SEQ ID NO: 41523 - protein, 15 aa, Homo sapiens
CARHEMGKLYYFDYW

SEQ ID NO: 41524 - protein, 21 aa, Homo sapiens
CARGGAAYSSWLLASDYFDYW

SEQ ID NO: 41525 - protein, 22 aa, Homo sapiens
CTRDRAMVGLVKVGLGLYFDLW

SEQ ID NO: 41526 - protein, 20 aa, Homo sapiens
CARTPDRYPDNRFWYFLDLW

SEQ ID NO: 41527 - protein, 16 aa, Homo sapiens
CAKDLRAGIYGYFDYW

SEQ ID NO: 41528 - protein, 17 aa, Homo sapiens
CARARSIGGVTYIFAYW

SEQ ID NO: 41529 - protein, 19 aa, Homo sapiens
CARDLLPATAVTGLGFHYW

SEQ ID NO: 41530 - protein, 18 aa, Homo sapiens
CAKDKRLGIVQGEYFDYW

SEQ ID NO: 41531 - protein, 21 aa, Homo sapiens
CVRDANQQWPLGYQYYGFDVW

SEQ ID NO: 41532 - protein, 15 aa, Homo sapiens
CAKEGGATWNQFDPW

SEQ ID NO: 41533 - protein, 19 aa, Homo sapiens
CARGGLRYFDWLSDYFDYW

SEQ ID NO: 41534 - protein, 18 aa, Homo sapiens
CAKGLAYFGSGSYWCDYW

SEQ ID NO: 41535 - protein, 15 aa, Homo sapiens
CARGLYYDSSGYDYW

SEQ ID NO: 41536 - protein, 18 aa, Homo sapiens
CARWGEAANPDVKAFDIW

SEQ ID NO: 41537 - protein, 15 aa, Homo sapiens
CAKPNLPSYWYFDLW

SEQ ID NO: 41538 - protein, 16 aa, Homo sapiens
CARDRLSESWYAFDIW

SEQ ID NO: 41539 - protein, 13 aa, Homo sapiens
CQHCSNWPPAWTF

SEQ ID NO: 41540 - protein, 18 aa, Homo sapiens
CAKTRYSSGWYDRYFDYW

SEQ ID NO: 41541 - protein, 21 aa, Homo sapiens
CARDLITVMEVGIANWYFDLW

SEQ ID NO: 41542 - protein, 14 aa, Homo sapiens
CARIDIVATIGDYW

SEQ ID NO: 41543 - protein, 19 aa, Homo sapiens
CARTPHKLLWFGEHYFDYW

SEQ ID NO: 41544 - protein, 17 aa, Homo sapiens
CARLMDSSNWYGSFDYW

SEQ ID NO: 41545 - protein, 19 aa, Homo sapiens
CAREAYSSSWYASCWFDPW

SEQ ID NO: 41546 - protein, 11 aa, Homo sapiens
CQRYNNWMYVF

SEQ ID NO: 41547 - protein, 18 aa, Homo sapiens
CARPPKRFSSGPYYFDSW

SEQ ID NO: 41548 - protein, 13 aa, Homo sapiens
CARDAAYNRFDQW

SEQ ID NO: 41549 - protein, 20 aa, Homo sapiens
CARALGLRDFLDYFYYMDVW

SEQ ID NO: 41550 - protein, 13 aa, Homo sapiens
CAKSPREGFLDYW

SEQ ID NO: 41551 - protein, 14 aa, Homo sapiens
CARSDFSAWNTDYW

SEQ ID NO: 41552 - protein, 24 aa, Homo sapiens
CAKDLQYYYGSGSYYNGYYGMDVW

SEQ ID NO: 41553 - protein, 17 aa, Homo sapiens
CARLQPCSGYDCPIDYW

SEQ ID NO: 41554 - protein, 13 aa, Homo sapiens
CQAWDSATHEYVF

SEQ ID NO: 41555 - protein, 18 aa, Homo sapiens
CAKDGVHDYGDYGPFDYW

SEQ ID NO: 41556 - protein, 17 aa, Homo sapiens
CARDERDYGSGSYYDYW

SEQ ID NO: 41557 - protein, 22 aa, Homo sapiens
CARVGYYDSSGYRPWGWYFDLW

SEQ ID NO: 41558 - protein, 21 aa, Homo sapiens
CARVENGFPYYYGSGSCPDYW

SEQ ID NO: 41559 - protein, 19 aa, Homo sapiens
CARGLHSWAWSYYYYMDVW

SEQ ID NO: 41560 - protein, 19 aa, Homo sapiens
CAKDIVSSSWSHSYNFDYW

SEQ ID NO: 41561 - protein, 18 aa, Homo sapiens
CTKDHSNFWSGPNWFDPW

SEQ ID NO: 41562 - protein, 25 aa, Homo sapiens
CARDRPGTSGHSSGWTYYYYGMDVW

SEQ ID NO: 41563 - protein, 22 aa, Homo sapiens
CARDLGGRSIEAAASNSYSDLW

SEQ ID NO: 41564 - protein, 20 aa, Homo sapiens
CARDPRVVRGVIIYNWFDPW

SEQ ID NO: 41565 - protein, 21 aa, Homo sapiens
CTRDNGGRRYFDWSRNGFDIW

SEQ ID NO: 41566 - protein, 24 aa, Homo sapiens
CASSNRYCSSTSCYRHYYYYMDVW

SEQ ID NO: 41567 - protein, 16 aa, Homo sapiens
CARDAPYGDRYYFDYW

SEQ ID NO: 41568 - protein, 14 aa, Homo sapiens
CAKERGTIRVFDYW

SEQ ID NO: 41569 - protein, 17 aa, Homo sapiens
CAAIRSGWPDPEYFQHW

SEQ ID NO: 41570 - protein, 19 aa, Homo sapiens
CAQDMRKLMVYAIGAFDLW

SEQ ID NO: 41571 - protein, 19 aa, Homo sapiens
CARQPIEFRPGEGGAFDIW

SEQ ID NO: 41572 - protein, 18 aa, Homo sapiens
CARDLVTMVRDESHFDYW

SEQ ID NO: 41573 - protein, 22 aa, Homo sapiens
CTRDRGGYYYAEGRKYWYFDLW

SEQ ID NO: 41574 - protein, 16 aa, Homo sapiens
CARDLVAGTRDAFHFW

SEQ ID NO: 41575 - protein, 16 aa, Homo sapiens
CARASLYGSFRFLDYW

SEQ ID NO: 41576 - protein, 17 aa, Homo sapiens
CALSPHLRFGDYYFDYW

SEQ ID NO: 41577 - protein, 21 aa, Homo sapiens
CARGQTTYYYGSQNHYPFDIW

SEQ ID NO: 41578 - protein, 14 aa, Homo sapiens
CARPDRDGYNFGYW

SEQ ID NO: 41579 - protein, 23 aa, Homo sapiens
CARDQYNWNYLVPRYYYYGMDVW

SEQ ID NO: 41580 - protein, 17 aa, Homo sapiens
CARDHFEGPRSGDFDYW

SEQ ID NO: 41581 - protein, 19 aa, Homo sapiens
CAKDAIAGSGWYGNWFDPW

SEQ ID NO: 41582 - protein, 16 aa, Homo sapiens
CAKDRYTVTPNWFDPW

SEQ ID NO: 41583 - protein, 18 aa, Homo sapiens
CARDAYDGDSFTYHFDLW

SEQ ID NO: 41584 - protein, 14 aa, Homo sapiens
CASRAKINGDYDYW

SEQ ID NO: 41585 - protein, 20 aa, Homo sapiens
CVRDDSRQESSVWFDAYDFW

SEQ ID NO: 41586 - protein, 17 aa, Homo sapiens
CARDRGLAVAYNAFDIW

SEQ ID NO: 41587 - protein, 16 aa, Homo sapiens
CARHLVRGDPIGFDIW

SEQ ID NO: 41588 - protein, 18 aa, Homo sapiens
CAKDKWFGIEGPYYFDYW

SEQ ID NO: 41589 - protein, 24 aa, Homo sapiens
CARGVRRDIVVVPAARGSYYFDYW

SEQ ID NO: 41590 - protein, 17 aa, Homo sapiens
CAREGSGNYLPNYFDSW

SEQ ID NO: 41591 - protein, 15 aa, Homo sapiens
CAKDADSSGWYSDSW

SEQ ID NO: 41592 - protein, 19 aa, Homo sapiens
CAREEWPFGDLEVGYFDLW

SEQ ID NO: 41593 - protein, 25 aa, Homo sapiens
CARRNTWIQLWLGGVWSAQNWFDPW

SEQ ID NO: 41594 - protein, 14 aa, Homo sapiens
CARNIYSKDYFDHW

SEQ ID NO: 41595 - protein, 16 aa, Homo sapiens
CARGAVTGTTANFDYW

SEQ ID NO: 41596 - protein, 15 aa, Homo sapiens
CASPGGARWLQFDYW

SEQ ID NO: 41597 - protein, 14 aa, Homo sapiens
CVRGIYTSGWYDYW

SEQ ID NO: 41598 - protein, 17 aa, Homo sapiens
CAHNLRIQLWSNYFDYW

SEQ ID NO: 41599 - protein, 23 aa, Homo sapiens
CATALTRYCSSTSCYRWYYFDYW

SEQ ID NO: 41600 - protein, 19 aa, Homo sapiens
CARRGYYYGSGTQGYFDYW

SEQ ID NO: 41601 - protein, 19 aa, Homo sapiens
CARADLVCSGTSCDWFDPW

SEQ ID NO: 41602 - protein, 18 aa, Homo sapiens
CARAPYTSSRGPYYFDYW

SEQ ID NO: 41603 - protein, 18 aa, Homo sapiens
CARDSIAVALVFNWFDPW

SEQ ID NO: 41604 - protein, 25 aa, Homo sapiens
CARLGPRKQYGSGSYSYYYYYMDVW

SEQ ID NO: 41605 - protein, 18 aa, Homo sapiens
CARGLPRDLWLLASFDYW

SEQ ID NO: 41606 - protein, 22 aa, Homo sapiens
CARLPPVSSGWLNPEYWYFDLW

SEQ ID NO: 41607 - protein, 15 aa, Homo sapiens
CARGFLGIWGWFDPW

SEQ ID NO: 41608 - protein, 24 aa, Homo sapiens
CAKDRSLGFSYYDSSGYSYYFDYW

SEQ ID NO: 41609 - protein, 18 aa, Homo sapiens
CAAQPEKDSYYYYYMDVW

SEQ ID NO: 41610 - protein, 18 aa, Homo sapiens
CARGSSIAAAAYSWFDPW

SEQ ID NO: 41611 - protein, 18 aa, Homo sapiens
CARMRWNYYDSIWYFDYW

SEQ ID NO: 41612 - protein, 21 aa, Homo sapiens
CAHWDCTNGVCYTPYNWFDPW

SEQ ID NO: 41613 - protein, 17 aa, Homo sapiens
CARDRMVRGVMAWFDPW

SEQ ID NO: 41614 - protein, 19 aa, Homo sapiens
CAKGLLGYCSGGSCYIDYW

SEQ ID NO: 41615 - protein, 15 aa, Homo sapiens
CATPITMVRGAFGYW

SEQ ID NO: 41616 - protein, 17 aa, Homo sapiens
CARIRDDFWGGYYGDYW

SEQ ID NO: 41617 - protein, 22 aa, Homo sapiens
CARAKRVVSGAVVYYYNGMDVW

SEQ ID NO: 41618 - protein, 19 aa, Homo sapiens
CARDRAAAASSYYYYMDVW

SEQ ID NO: 41619 - protein, 19 aa, Homo sapiens
CAKDPYPWDILTGYYPDYW

SEQ ID NO: 41620 - protein, 17 aa, Homo sapiens
CARDQAYYFDSSGWDYW

SEQ ID NO: 41621 - protein, 15 aa, Homo sapiens
CARDAVGTDWDFDLW

SEQ ID NO: 41622 - protein, 18 aa, Homo sapiens
CARDLEDIVPTGDAFDVW

SEQ ID NO: 41623 - protein, 22 aa, Homo sapiens
CARAFRFYYYYGSGGAEYFQHW

SEQ ID NO: 41624 - protein, 22 aa, Homo sapiens
CARGGVEAAGSTLVGYYYFDFW

SEQ ID NO: 41625 - protein, 18 aa, Homo sapiens
CAKALYGQWLVPEAFDIW

SEQ ID NO: 41626 - protein, 19 aa, Homo sapiens
CARGRGEILTGYEETFDYW

SEQ ID NO: 41627 - protein, 18 aa, Homo sapiens
CARGKSRGWSVLSYMDVW

SEQ ID NO: 41628 - protein, 23 aa, Homo sapiens
CARDVRISPYCSGGSCYSLFDYW

SEQ ID NO: 41629 - protein, 25 aa, Homo sapiens
CARWTDYDILTGYYIYSGPYYFDYW

SEQ ID NO: 41630 - protein, 19 aa, Homo sapiens
CARHLVVVDRPTSEYFKEW

SEQ ID NO: 41631 - protein, 23 aa, Homo sapiens
CARSPLSYDILTGYYEAYYMDVW

SEQ ID NO: 41632 - protein, 24 aa, Homo sapiens
CARQKRPDYSSSSLKFGHVYFDIW

SEQ ID NO: 41633 - protein, 12 aa, Homo sapiens
CQQYKIWPTWTF

SEQ ID NO: 41634 - protein, 18 aa, Homo sapiens
CAHRRAAGTPPGYYFDYW

SEQ ID NO: 41635 - protein, 14 aa, Homo sapiens
CAKDVGQWLDLDYW

SEQ ID NO: 41636 - protein, 17 aa, Homo sapiens
CVKDSTWQGRFGYFDYW

SEQ ID NO: 41637 - protein, 18 aa, Homo sapiens
CARYCGGDCYSYGAFHIW

SEQ ID NO: 41638 - protein, 15 aa, Homo sapiens
CARAKDGAWGAFDIW

SEQ ID NO: 41639 - protein, 20 aa, Homo sapiens
CAKDNPASVSGWYGGWFDPW

SEQ ID NO: 41640 - protein, 13 aa, Homo sapiens
CSSYTGRSTLLLF

SEQ ID NO: 41641 - protein, 12 aa, Homo sapiens
CVRSFCGQNDYW

SEQ ID NO: 41642 - protein, 22 aa, Homo sapiens
CARVEDWEWLRLTTHLTPVDYW

SEQ ID NO: 41643 - protein, 13 aa, Homo sapiens
CATFNYGDYASYW

SEQ ID NO: 41644 - protein, 18 aa, Homo sapiens
CTRGGYHDYGTNRWFDVW

SEQ ID NO: 41645 - protein, 19 aa, Homo sapiens
CTPHYGSGKYYYYYYMDVW

SEQ ID NO: 41646 - protein, 16 aa, Homo sapiens
CARPRHNYGLYAFDIW

SEQ ID NO: 41647 - protein, 17 aa, Homo sapiens
CARHEGIWDYYEPIDYW

SEQ ID NO: 41648 - protein, 14 aa, Homo sapiens
CARGKWPAYYFDDW

SEQ ID NO: 41649 - protein, 24 aa, Homo sapiens
CARDPTYYDFWSGYYKAPYAFDIW

SEQ ID NO: 41650 - protein, 22 aa, Homo sapiens
CARDSRCLGSAWCLDYYYMDVW

SEQ ID NO: 41651 - protein, 17 aa, Homo sapiens
CARSRGFTTVVLDFDIW

SEQ ID NO: 41652 - protein, 21 aa, Homo sapiens
CAKPWIGVIAAAGSLYYFDYW

SEQ ID NO: 41653 - protein, 13 aa, Homo sapiens
CARRRTENAFDIW

SEQ ID NO: 41654 - protein, 17 aa, Homo sapiens
CARSSSSWSRRSAFDIW

SEQ ID NO: 41655 - protein, 17 aa, Homo sapiens
CARHGYIHGRYDFFDIW

SEQ ID NO: 41656 - protein, 18 aa, Homo sapiens
CAREFASSMYSSSPEDYW

SEQ ID NO: 41657 - protein, 21 aa, Homo sapiens
CARLPPNCAKNNCYFLAFDNW

SEQ ID NO: 41658 - protein, 17 aa, Homo sapiens
CAKGVSYSGSYAYFHFW

SEQ ID NO: 41659 - protein, 19 aa, Homo sapiens
CARDGWPRYSGYGYYFDYW

SEQ ID NO: 41660 - protein, 19 aa, Homo sapiens
CARFVQANSAYDLYYFDYW

SEQ ID NO: 41661 - protein, 20 aa, Homo sapiens
CARHGPFLSSVWPYWYFDLW

SEQ ID NO: 41662 - protein, 17 aa, Homo sapiens
CAKDRGFYGSGSYYDYW

SEQ ID NO: 41663 - protein, 11 aa, Homo sapiens
CQQYFETPVAF

SEQ ID NO: 41664 - protein, 23 aa, Homo sapiens
CTTDPRLLWFGEAGIRQKYFDIW

SEQ ID NO: 41665 - protein, 12 aa, Homo sapiens
CTKGDQGSFDYW

SEQ ID NO: 41666 - protein, 23 aa, Homo sapiens
CARESSGYDYSVSMVTDDGLDIW

SEQ ID NO: 41667 - protein, 13 aa, Homo sapiens
CVKSSGMYYFDYW

SEQ ID NO: 41668 - protein, 18 aa, Homo sapiens
CAKDRDSGIAVAARIDYW

SEQ ID NO: 41669 - protein, 21 aa, Homo sapiens
CARDSLNRLPYLYNYYGMDVW

SEQ ID NO: 41670 - protein, 22 aa, Homo sapiens
CARATQPDPHRYFDWLFIFDIW

SEQ ID NO: 41671 - protein, 17 aa, Homo sapiens
CARDVIGDNWNEPFDYW

SEQ ID NO: 41672 - protein, 19 aa, Homo sapiens
CARHWEGSYGPWFALFDYW

SEQ ID NO: 41673 - protein, 20 aa, Homo sapiens
CARHEVGSYPSGSYIWFDPW

SEQ ID NO: 41674 - protein, 11 aa, Homo sapiens
CSSYADSNNVF

SEQ ID NO: 41675 - protein, 14 aa, Homo sapiens
CARDDTGPMQIDYW

SEQ ID NO: 41676 - protein, 18 aa, Homo sapiens
CARGQGAAAGTSGDFDYW

SEQ ID NO: 41677 - protein, 16 aa, Homo sapiens
CARFVAATTWGYFDTW

SEQ ID NO: 41678 - protein, 16 aa, Homo sapiens
CARGIYTLQQPNFDYW

SEQ ID NO: 41679 - protein, 16 aa, Homo sapiens
CAGDSSGSLGGAFDIW

SEQ ID NO: 41680 - protein, 16 aa, Homo sapiens
CARQRGTTLGDWFDPW

SEQ ID NO: 41681 - protein, 23 aa, Homo sapiens
CARGRRGNGSGSDRPYYYYMDVW

SEQ ID NO: 41682 - protein, 19 aa, Homo sapiens
CARGRDYGDYGYYYYMDVW

SEQ ID NO: 41683 - protein, 17 aa, Homo sapiens
CATDLGPYAYIRRYDYW

SEQ ID NO: 41684 - protein, 29 aa, Homo sapiens
CARDGGVGRAPGYSSGWAEKTYYPIPDYW

SEQ ID NO: 41685 - protein, 18 aa, Homo sapiens
CAKDSRLGIAAAAYFDYW

SEQ ID NO: 41686 - protein, 17 aa, Homo sapiens
CAVPGDSSGWYGLIDYW

SEQ ID NO: 41687 - protein, 16 aa, Homo sapiens
CVKGGSTMVWSNFDYW

SEQ ID NO: 41688 - protein, 14 aa, Homo sapiens
CARWNSSSSAFDVW

SEQ ID NO: 41689 - protein, 14 aa, Homo sapiens
CASWEYNSGSFNYW

SEQ ID NO: 41690 - protein, 21 aa, Homo sapiens
CARGGSSSWFRNQPLNWFDPW

SEQ ID NO: 41691 - protein, 17 aa, Homo sapiens
CAKTVSPFGVKDAFDIW

SEQ ID NO: 41692 - protein, 14 aa, Homo sapiens
CAHMSVTTDVFDYW

SEQ ID NO: 41693 - protein, 21 aa, Homo sapiens
CARDKGYTYGYHDTSGYSDYW

SEQ ID NO: 41694 - protein, 25 aa, Homo sapiens
CAAGLDNVVMVYDAIQYNYYGMDVW

SEQ ID NO: 41695 - protein, 21 aa, Homo sapiens
CARERGYCSGGSCYHSAFDIW

SEQ ID NO: 41696 - protein, 18 aa, Homo sapiens
CARGSSWYSEPINWFDPW

SEQ ID NO: 41697 - protein, 18 aa, Homo sapiens
CAHRRPIAAAGQYYFDSW

SEQ ID NO: 41698 - protein, 15 aa, Homo sapiens
CARDALRRLDWLDYW

SEQ ID NO: 41699 - protein, 19 aa, Homo sapiens
CARDTKGGFTVTSGWFDPW

SEQ ID NO: 41700 - protein, 16 aa, Homo sapiens
CARMAVSGTYWYFDLW

SEQ ID NO: 41701 - protein, 19 aa, Homo sapiens
CAKVPTWGIAGIIGSFDPW

SEQ ID NO: 41702 - protein, 13 aa, Homo sapiens
CQQYNTFSSSYTF

SEQ ID NO: 41703 - protein, 22 aa, Homo sapiens
CARDRDESTTWYRYYYNGMDVW

SEQ ID NO: 41704 - protein, 18 aa, Homo sapiens
CARDSGLFGVAPDAFDIW

SEQ ID NO: 41705 - protein, 18 aa, Homo sapiens
CAKGDLAYCGGDCYPDYW

SEQ ID NO: 41706 - protein, 20 aa, Homo sapiens
CARDDAGRYYGSGNDAFDIW

SEQ ID NO: 41707 - protein, 16 aa, Homo sapiens
CARVLDRGRDDAFDIW

SEQ ID NO: 41708 - protein, 17 aa, Homo sapiens
CTCNDHGSGVYGWFDPW

SEQ ID NO: 41709 - protein, 22 aa, Homo sapiens
CAKDGRHLADPLLYYYSGMDVW

SEQ ID NO: 41710 - protein, 15 aa, Homo sapiens
CARDGRYRGDPLDYW

SEQ ID NO: 41711 - protein, 18 aa, Homo sapiens
CARSRDYYDSSGYFYDYW

SEQ ID NO: 41712 - protein, 10 aa, Homo sapiens
CQQYDNLGAF

SEQ ID NO: 41713 - protein, 16 aa, Homo sapiens
CARDACGAGACYQTYW

SEQ ID NO: 41714 - protein, 18 aa, Homo sapiens
CAKMGSRDYGDYLTHDYW

SEQ ID NO: 41715 - protein, 23 aa, Homo sapiens
CARDLYYYGSGSYLDPYNWFDPW

SEQ ID NO: 41716 - protein, 13 aa, Homo sapiens
CARVDLPEGFEYW

SEQ ID NO: 41717 - protein, 16 aa, Homo sapiens
CARVVVGATSGYIDSW

SEQ ID NO: 41718 - protein, 13 aa, Homo sapiens
CATDTGFDAFDMW

SEQ ID NO: 41719 - protein, 17 aa, Homo sapiens
CARAAVGWDYYYYMDVW

SEQ ID NO: 41720 - protein, 16 aa, Homo sapiens
CATYASGLKADAFDIW

SEQ ID NO: 41721 - protein, 13 aa, Homo sapiens
CARISGSGMIDYW

SEQ ID NO: 41722 - protein, 21 aa, Homo sapiens
CAREGYYRDSSDYYYDAYDIW

SEQ ID NO: 41723 - protein, 16 aa, Homo sapiens
CVRDMPQMGYQAFDYW

SEQ ID NO: 41724 - protein, 14 aa, Homo sapiens
CARVMEQLVLLDYW

SEQ ID NO: 41725 - protein, 14 aa, Homo sapiens
CVRLPVVGSAVDYW

SEQ ID NO: 41726 - protein, 21 aa, Homo sapiens
CARDGGNYYDSSGYLRPPDYW

SEQ ID NO: 41727 - protein, 20 aa, Homo sapiens
CAKDLGYSSGWYLEGAFDIW

SEQ ID NO: 41728 - protein, 18 aa, Homo sapiens
CARDPLTGYYRGQGFDYW

SEQ ID NO: 41729 - protein, 22 aa, Homo sapiens
CARSWGYGSGYLYYYYFYMDVW

SEQ ID NO: 41730 - protein, 18 aa, Homo sapiens
CVRRRWFGEPHTWSFDWW

SEQ ID NO: 41731 - protein, 16 aa, Homo sapiens
CARHSGRFGESNFPYW

SEQ ID NO: 41732 - protein, 15 aa, Homo sapiens
CAKYTLYISGPFDYW

SEQ ID NO: 41733 - protein, 23 aa, Homo sapiens
CAKSRSFDWWGRLAGRGDAFDVW

SEQ ID NO: 41734 - protein, 21 aa, Homo sapiens
CAREYIMITFGGVMADAFDIW

SEQ ID NO: 41735 - protein, 17 aa, Homo sapiens
CARDNGPPSKYRYMDLW

SEQ ID NO: 41736 - protein, 26 aa, Homo sapiens
CARGAPVGFWSGSPIHYYYYYGMDVW

SEQ ID NO: 41737 - protein, 16 aa, Homo sapiens
CARTSIAAVGTAFDYW

SEQ ID NO: 41738 - protein, 16 aa, Homo sapiens
CVRAAEPPSGNAFDIW

SEQ ID NO: 41739 - protein, 17 aa, Homo sapiens
CARDQGGYYTGGYFDCW

SEQ ID NO: 41740 - protein, 21 aa, Homo sapiens
CARFITMLRGVIRPLYYMDVW

SEQ ID NO: 41741 - protein, 19 aa, Homo sapiens
CARGNPWLGPYYYYYMDVW

SEQ ID NO: 41742 - protein, 22 aa, Homo sapiens
CARGPTTSVATIIYYYYYMDVW

SEQ ID NO: 41743 - protein, 20 aa, Homo sapiens
CARRGSGYSYGYIGGWFDPW

SEQ ID NO: 41744 - protein, 14 aa, Homo sapiens
CARNYDPSHAFDIW

SEQ ID NO: 41745 - protein, 25 aa, Homo sapiens
CARDGTIRFFDWLPPPGYYYGMDVW

SEQ ID NO: 41746 - protein, 18 aa, Homo sapiens
CARDRANVAFGPYAFDIW

SEQ ID NO: 41747 - protein, 17 aa, Homo sapiens
CARDENTMTTCDYFDYW

SEQ ID NO: 41748 - protein, 31 aa, Homo sapiens
CARVMRLVLPAATPKITLSAAGYASAAFDLW

SEQ ID NO: 41749 - protein, 15 aa, Homo sapiens
CAKDLLWFGGIFDYW

SEQ ID NO: 41750 - protein, 18 aa, Homo sapiens
CARTKRGYSGYDNAFDIW

SEQ ID NO: 41751 - protein, 16 aa, Homo sapiens
CARHAPHSYGPEFEYW

SEQ ID NO: 41752 - protein, 17 aa, Homo sapiens
CARGQHPSEFHFYFDYW

SEQ ID NO: 41753 - protein, 15 aa, Homo sapiens
CAIPEVLEWFLFDYW

SEQ ID NO: 41754 - protein, 16 aa, Homo sapiens
CARKTAGMIVVVSDYW

SEQ ID NO: 41755 - protein, 23 aa, Homo sapiens
CARGRSRITMVRGVTGPYYFDYW

SEQ ID NO: 41756 - protein, 18 aa, Homo sapiens
CARDRRHSYGSVDYYDFW

SEQ ID NO: 41757 - protein, 16 aa, Homo sapiens
CARGTDGIQVWPGDYW

SEQ ID NO: 41758 - protein, 16 aa, Homo sapiens
CIWSSTWDKRGAFDIW

SEQ ID NO: 41759 - protein, 15 aa, Homo sapiens
CARESFSQPRGIDYW

SEQ ID NO: 41760 - protein, 25 aa, Homo sapiens
CSTDILGYCSGGSCYVRPYDVFDIW

SEQ ID NO: 41761 - protein, 16 aa, Homo sapiens
CARSQQLVLGRPSDYW

SEQ ID NO: 41762 - protein, 14 aa, Homo sapiens
CASTRYGDYVTDYW

SEQ ID NO: 41763 - protein, 19 aa, Homo sapiens [sequence omitted]

SEQ ID NO: 41764 - protein, 21 aa, Homo sapiens
CARHVPRPYSHGRLSYYFDFW

SEQ ID NO: 41765 - protein, 25 aa, Homo sapiens
CASRGYCSSTSCYETGYYYYYMDVW

SEQ ID NO: 41766 - protein, 22 aa, Homo sapiens
CARERTGYSSGWEYYYYGMDVW

SEQ ID NO: 41767 - protein, 24 aa, Homo sapiens
CARGSRDDFWSGYYRDYYYGMDVW

SEQ ID NO: 41768 - protein, 16 aa, Homo sapiens
CAKARGYSYGDGVDYW

SEQ ID NO: 41769 - protein, 27 aa, Homo sapiens
CARPKALYDYVWGSYRYTKERDAFDIW

SEQ ID NO: 41770 - protein, 19 aa, Homo sapiens
CVKDRMSFGELLWHAFDIW

SEQ ID NO: 41771 - protein, 15 aa, Homo sapiens
CARHGGSSWYPFDYW

SEQ ID NO: 41772 - protein, 13 aa, Homo sapiens
CNVYSNYYYFDYW

SEQ ID NO: 41773 - protein, 18 aa, Homo sapiens
CAKDRWKFYYDVLDFDYW

SEQ ID NO: 41774 - protein, 15 aa, Homo sapiens
CAKVRYGDWGDFDSW

SEQ ID NO: 41775 - protein, 16 aa, Homo sapiens
CARARRSYSYQGFDFW

SEQ ID NO: 41776 - protein, 21 aa, Homo sapiens
CARVMSHSDQLVLSGHAFDIW

SEQ ID NO: 41777 - protein, 23 aa, Homo sapiens
CAKVGETYYYGSGRGFPDYFDYW

SEQ ID NO: 41778 - protein, 19 aa, Homo sapiens
CARGFTMVRGENYYYMDVW

SEQ ID NO: 41779 - protein, 21 aa, Homo sapiens
CARAPPPDESTRSSWGYFDLW

SEQ ID NO: 41780 - protein, 17 aa, Homo sapiens
CARDPYGSESPYYFDNW

SEQ ID NO: 41781 - protein, 23 aa, Homo sapiens
CARVLPPKYSSGWYLRTDWFDPW

SEQ ID NO: 41782 - protein, 18 aa, Homo sapiens
CAHQNTLGITGTTAFQYW

SEQ ID NO: 41783 - protein, 18 aa, Homo sapiens
CARGMQLYFGELSYFDQW

SEQ ID NO: 41784 - protein, 18 aa, Homo sapiens
CVSEFGEYDILTGYNDYW

SEQ ID NO: 41785 - protein, 11 aa, Homo sapiens
CAHAPDAFDIW

SEQ ID NO: 41786 - protein, 21 aa, Homo sapiens
CARGTRQWLVRPPYYYYMDVW

SEQ ID NO: 41787 - protein, 18 aa, Homo sapiens
CARGFSAQWLVRHPSDYW

SEQ ID NO: 41788 - protein, 19 aa, Homo sapiens
CAKPRTIWFGELWGAFDIW

SEQ ID NO: 41789 - protein, 23 aa, Homo sapiens
CARGKYYDFWSGPAYYYYGMDVW

SEQ ID NO: 41790 - protein, 18 aa, Homo sapiens
CAKADCSTTSCQNWFDPW

SEQ ID NO: 41791 - protein, 20 aa, Homo sapiens
CARDGTTAGSHHLALFFDFW

SEQ ID NO: 41792 - protein, 25 aa, Homo sapiens
CARRLGESLLLWFGEDTAGGAFDIW

SEQ ID NO: 41793 - protein, 20 aa, Homo sapiens
CAKDNWYYYGSGVEGAFDIW

SEQ ID NO: 41794 - protein, 24 aa, Homo sapiens
CAREGGGYSYGYVRSYYYYYMDVW

SEQ ID NO: 41795 - protein, 22 aa, Homo sapiens
CATGAPYDFWHFLKRGPSFDYW

SEQ ID NO: 41796 - protein, 17 aa, Homo sapiens
CAKGKFSSSWNDAFDIW

SEQ ID NO: 41797 - protein, 22 aa, Homo sapiens
CARDKLLWFGELSPIPSPIDYW

SEQ ID NO: 41798 - protein, 23 aa, Homo sapiens
CARGSRGYYDILTGYYTGGFDYW

SEQ ID NO: 41799 - protein, 20 aa, Homo sapiens
CAKDMATMVRGSQSIYFDYW

SEQ ID NO: 41800 - protein, 19 aa, Homo sapiens
CAKSPTLWFGELFEWFDPW

SEQ ID NO: 41801 - protein, 16 aa, Homo sapiens
CAKDGLLEMENAFDIW

SEQ ID NO: 41802 - protein, 18 aa, Homo sapiens
CAKDTRFTIAAVGNFDYW

SEQ ID NO: 41803 - protein, 24 aa, Homo sapiens
CARKFSKVETAMVYYYYYYGMDVW

SEQ ID NO: 41804 - protein, 18 aa, Homo sapiens
CARDLYDFWSGDDAFDIW

SEQ ID NO: 41805 - protein, 20 aa, Homo sapiens
CAKDDCGGDCYSRYWYFDLW

SEQ ID NO: 41806 - protein, 16 aa, Homo sapiens
CARRNYGSGTFSFDSW

SEQ ID NO: 41807 - protein, 17 aa, Homo sapiens
CARRPGLRYVQWYFDLW

SEQ ID NO: 41808 - protein, 13 aa, Homo sapiens
CGHTVWGAYVDSW

SEQ ID NO: 41809 - protein, 22 aa, Homo sapiens
CARDFPRDLALWFGEPQPPDYW

SEQ ID NO: 41810 - protein, 17 aa, Homo sapiens
CARMFGYGGNSDYFDYW

SEQ ID NO: 41811 - protein, 17 aa, Homo sapiens
CAKDSRVRGYSYDGDYW

SEQ ID NO: 41812 - protein, 20 aa, Homo sapiens
CARVLFCGGDCYSGYYFDYW

SEQ ID NO: 41813 - protein, 15 aa, Homo sapiens
CARYGTYINHAFDSW

SEQ ID NO: 41814 - protein, 17 aa, Homo sapiens
CAKDLTKLPAYVLLDYW

SEQ ID NO: 41815 - protein, 17 aa, Homo sapiens
CARDSPGSWYVLGFDYW

SEQ ID NO: 41816 - protein, 18 aa, Homo sapiens
CAKVTIFGVVIIEGFDYW

SEQ ID NO: 41817 - protein, 19 aa, Homo sapiens
CARDNSGWSNYYYYYMDVW

SEQ ID NO: 41818 - protein, 17 aa, Homo sapiens
CARGLARGLKRFTFDYW

SEQ ID NO: 41819 - protein, 14 aa, Homo sapiens
CARYVAMNASFDYW

SEQ ID NO: 41820 - protein, 16 aa, Homo sapiens
CVTGAYGSTDRPFDHW

SEQ ID NO: 41821 - protein, 18 aa, Homo sapiens
CAKDGAYMGRRTYAFDLW

SEQ ID NO: 41822 - protein, 16 aa, Homo sapiens
CARDTTPGVEAAVDIW

SEQ ID NO: 41823 - protein, 15 aa, Homo sapiens
CAILHPDGYNLFDDW

SEQ ID NO: 41824 - protein, 21 aa, Homo sapiens
CARHPRYCSANSCHPGYFDYW

SEQ ID NO: 41825 - protein, 19 aa, Homo sapiens
CARRPPGEFWSGVNWFDPW

SEQ ID NO: 41826 - protein, 20 aa, Homo sapiens
CARDKSEYQWLVPQDAFDIW

SEQ ID NO: 41827 - protein, 16 aa, Homo sapiens
CARGRVTTTRLFFDYW

SEQ ID NO: 41828 - protein, 19 aa, Homo sapiens
CARGPTTVTTEWDRAFDIW

SEQ ID NO: 41829 - protein, 13 aa, Homo sapiens
CHHYGSSPSGGAF

SEQ ID NO: 41830 - protein, 18 aa, Homo sapiens
CAKDPTSGIWWLPPPDYW

SEQ ID NO: 41831 - protein, 17 aa, Homo sapiens
CARHGDSGSWNYYMDVW

SEQ ID NO: 41832 - protein, 19 aa, Homo sapiens
CAKEISMYSSGWYFTVDYW

SEQ ID NO: 41833 - protein, 24 aa, Homo sapiens
CARDTGASTTFLARVPHPSPFDYW

SEQ ID NO: 41834 - protein, 13 aa, Homo sapiens
CARVRRNGGVDYW

SEQ ID NO: 41835 - protein, 23 aa, Homo sapiens
CAACDYYGTGSIFWYYYYYMDVW

SEQ ID NO: 41836 - protein, 17 aa, Homo sapiens
CAREGGTSGHAGFFDHW

SEQ ID NO: 41837 - protein, 24 aa, Homo sapiens
CARVRGSSQYSSGWYYYYYYMDVW

SEQ ID NO: 41838 - protein, 30 aa, Homo sapiens
CARVSPRNHLHLVFPGILTGDSNPRYFDLW

SEQ ID NO: 41839 - protein, 21 aa, Homo sapiens
CAKEYSSGWFNWGYYYGMDVW

SEQ ID NO: 41840 - protein, 22 aa, Homo sapiens
CARVTLRFLEWDIIQGDWFDPW

SEQ ID NO: 41841 - protein, 21 aa, Homo sapiens
CARIGGGYDSGGYYYWYFDLW

SEQ ID NO: 41842 - protein, 14 aa, Homo sapiens
CAKYSYGHPDFDYW

SEQ ID NO: 41843 - protein, 21 aa, Homo sapiens
CAKDLGQWLVPPYPAHYFDPW

SEQ ID NO: 41844 - protein, 25 aa, Homo sapiens
CARGQNEYYCTNITCYSTIDALDIW

SEQ ID NO: 41845 - protein, 19 aa, Homo sapiens
CARIDCSGLRCYWYYFDYW

SEQ ID NO: 41846 - protein, 17 aa, Homo sapiens
CVLAAAVTPRPDPFDVW

SEQ ID NO: 41847 - protein, 21 aa, Homo sapiens
CARDGRSGDLFGTVKRAFDYW

SEQ ID NO: 41848 - protein, 18 aa, Homo sapiens
CATNYDILTGYFDAFDIW

SEQ ID NO: 41849 - protein, 17 aa, Homo sapiens
CASLCDDSYGNGGVDYW

SEQ ID NO: 41850 - protein, 14 aa, Homo sapiens
CARRYYDVGPFDYW

SEQ ID NO: 41851 - protein, 19 aa, Homo sapiens
CARHNTGILRYFDWQFDYW

SEQ ID NO: 41852 - protein, 19 aa, Homo sapiens
CARVTMVRGATRALTSDYW

SEQ ID NO: 41853 - protein, 25 aa, Homo sapiens
CARGNSPGKGIQLWLPYYYYGMDVW

SEQ ID NO: 41854 - protein, 16 aa, Homo sapiens
CAREVLPHPAGRFDPW

SEQ ID NO: 41855 - protein, 16 aa, Homo sapiens
CARGFGGSYYGAFDIW

SEQ ID NO: 41856 - protein, 17 aa, Homo sapiens
CAKDIGYSYDQYYFDYW

SEQ ID NO: 41857 - protein, 19 aa, Homo sapiens
CARGGDYDITSPINYFDYW

SEQ ID NO: 41858 - protein, 18 aa, Homo sapiens
CAKGGAGGVIVMFYFDYW

SEQ ID NO: 41859 - protein, 14 aa, Homo sapiens
CTRETWNYDHFDYW

SEQ ID NO: 41860 - protein, 22 aa, Homo sapiens
CARDFTVTTSHTDGYYYGMDVW

SEQ ID NO: 41861 - protein, 20 aa, Homo sapiens
CATSPPMVRGESRFNWFDPW

SEQ ID NO: 41862 - protein, 18 aa, Homo sapiens
CARGGYYDYVWGSYVAYW

SEQ ID NO: 41863 - protein, 18 aa, Homo sapiens
CAKEGSYNWNYEGYFDYW

SEQ ID NO: 41864 - protein, 12 aa, Homo sapiens
CTTDLPYYNDPW

SEQ ID NO: 41865 - protein, 20 aa, Homo sapiens
CAKDYPSPILPLTDKLFDCW

SEQ ID NO: 41866 - protein, 18 aa, Homo sapiens
CAKVLSAWRLGENAFDIW

SEQ ID NO: 41867 - protein, 20 aa, Homo sapiens
CAKGGYGPGRPGSGRVFDPW

SEQ ID NO: 41868 - protein, 15 aa, Homo sapiens
CASTWYTSDHAFDYW

SEQ ID NO: 41869 - protein, 21 aa, Homo sapiens
CAKDWDSGVWYSSSSRGLDYW

SEQ ID NO: 41870 - protein, 16 aa, Homo sapiens
CAHSGYSCCPFLIDYW

SEQ ID NO: 41871 - protein, 31 aa, Homo sapiens
CARAPCLGICDWQDVQPPFGELSSLLAFDVW

SEQ ID NO: 41872 - protein, 19 aa, Homo sapiens
CAKDSNIGVAGTPHYFDFW

SEQ ID NO: 41873 - protein, 19 aa, Homo sapiens
CARAPPGLYASTPLGFDYW

SEQ ID NO: 41874 - protein, 19 aa, Homo sapiens
CARDSSGWYWGFRHAFDIW

SEQ ID NO: 41875 - protein, 17 aa, Homo sapiens
CAREIGSGSYYDAFDIW

SEQ ID NO: 41876 - protein, 16 aa, Homo sapiens
CAGSHYYDSSGPYDYW

SEQ ID NO: 41877 - protein, 16 aa, Homo sapiens
CARVREWLLLGAFDIW

SEQ ID NO: 41878 - protein, 18 aa, Homo sapiens
CAGGGAVLRGVIDYFGSW

SEQ ID NO: 41879 - protein, 21 aa, Homo sapiens
CARHATITMIVVVIPANFDYW

SEQ ID NO: 41880 - protein, 18 aa, Homo sapiens
CARITRSGSGGYYVVDYW

SEQ ID NO: 41881 - protein, 26 aa, Homo sapiens
CTSRLWYCSSTSCTDLNYYYYGMDVW

SEQ ID NO: 41882 - protein, 23 aa, Homo sapiens
CARVLAVHYYGSGSYYNDAFDIW

SEQ ID NO: 41883 - protein, 18 aa, Homo sapiens
CAKDRFSGILGISYMDVW

SEQ ID NO: 41884 - protein, 15 aa, Homo sapiens
CVKGGAAAIDPFDIW

SEQ ID NO: 41885 - protein, 16 aa, Homo sapiens
CAKDVRERAATTFDYW

SEQ ID NO: 41886 - protein, 34 aa, Homo sapiens
CALPILKTEDTAVYYCTRDRRLGSSSWQYYFDYW

SEQ ID NO: 41887 - protein, 17 aa, Homo sapiens
CARLITGTTLGYTFDVW

SEQ ID NO: 41888 - protein, 19 aa, Homo sapiens
CARVRPLSADYYYYGMDVW

SEQ ID NO: 41889 - protein, 22 aa, Homo sapiens
CARSDIVAPRLYYYYYYYMDVW

SEQ ID NO: 41890 - protein, 21 aa, Homo sapiens
CAKDITGYSYGIYYYYGMDVW

SEQ ID NO: 41891 - protein, 18 aa, Homo sapiens
CASRYGYCTKYTCYWLYW

SEQ ID NO: 41892 - protein, 14 aa, Homo sapiens
CSSLVGSVTEADYW

SEQ ID NO: 41893 - protein, 18 aa, Homo sapiens
CARDRPIVATISYYFDYW

SEQ ID NO: 41894 - protein, 24 aa, Homo sapiens
CARDFSGAMITFGGVILHNYFDYW

SEQ ID NO: 41895 - protein, 14 aa, Homo sapiens
CARAPADIVSLDYW

SEQ ID NO: 41896 - protein, 22 aa, Homo sapiens
CARDALEVRGRGMTFSYYMDVW

SEQ ID NO: 41897 - protein, 20 aa, Homo sapiens
CAKMNRGDIVVVPAAHFDYW

SEQ ID NO: 41898 - protein, 19 aa, Homo sapiens
CARSKRQYCSGGSCYLDYW

SEQ ID NO: 41899 - protein, 20 aa, Homo sapiens
CASGYGSGSYYSWADAFDIW

SEQ ID NO: 41900 - protein, 19 aa, Homo sapiens
CARGLYYDILTGYNWFDPW

SEQ ID NO: 41901 - protein, 18 aa, Homo sapiens
CTSSVVVVAARVGLLDYW

SEQ ID NO: 41902 - protein, 19 aa, Homo sapiens
CASVHYDYLWGSTHAFDFW

SEQ ID NO: 41903 - protein, 18 aa, Homo sapiens
CATEITMVRGVLDAFDIW

SEQ ID NO: 41904 - protein, 21 aa, Homo sapiens
CARDVYGSGSYYNADHAFDIW

SEQ ID NO: 41905 - protein, 20 aa, Homo sapiens
CARDGWLLWFGESANHFDIW

SEQ ID NO: 41906 - protein, 21 aa, Homo sapiens
CARESPYSYYGSGSYNAFDIW

SEQ ID NO: 41907 - protein, 18 aa, Homo sapiens
CARDGRTDTAMAPHFDYW

SEQ ID NO: 41908 - protein, 16 aa, Homo sapiens
CAKGYGYSSRGFFDYW

SEQ ID NO: 41909 - protein, 15 aa, Homo sapiens
CAKVSGWYETFFDYW

SEQ ID NO: 41910 - protein, 21 aa, Homo sapiens
CARALYYSDSGNSVLGWIDPW

SEQ ID NO: 41911 - protein, 16 aa, Homo sapiens
CAKSAGIAAAGTLDYW

SEQ ID NO: 41912 - protein, 13 aa, Homo sapiens
CQAWVGSTAGLVF

SEQ ID NO: 41913 - protein, 15 aa, Homo sapiens
CAKGGGGLHWYFDYW

SEQ ID NO: 41914 - protein, 13 aa, Homo sapiens
CTTERLRYYMDVW

SEQ ID NO: 41915 - protein, 21 aa, Homo sapiens
CAREIDPMVRGVIISSVLDYW

SEQ ID NO: 41916 - protein, 18 aa, Homo sapiens
CARHRLGGWYHYYYFDLW

SEQ ID NO: 41917 - protein, 18 aa, Homo sapiens
CAKPPLGQQLEPYYFDYW

SEQ ID NO: 41918 - protein, 24 aa, Homo sapiens
CAKDPARIPLWAPMAYDHYAMDVW

SEQ ID NO: 41919 - protein, 15 aa, Homo sapiens
CAREGQWLVSGFDYW

SEQ ID NO: 41920 - protein, 16 aa, Homo sapiens
CARPGRVGPTSEFDYW

SEQ ID NO: 41921 - protein, 21 aa, Homo sapiens
CATHPRGRDYYGSGSWDLDYW

SEQ ID NO: 41922 - protein, 19 aa, Homo sapiens
CAGRGDVDTAVVKDYFDYW

SEQ ID NO: 41923 - protein, 21 aa, Homo sapiens
CARDPWECTGGSCYSRYFDLW

SEQ ID NO: 41924 - protein, 17 aa, Homo sapiens
CAKDMGHGSGRKIFDYW

SEQ ID NO: 41925 - protein, 16 aa, Homo sapiens
CAKGTMIQLLFYFDYW

SEQ ID NO: 41926 - protein, 13 aa, Homo sapiens
CAIAGYSSGWDYW

SEQ ID NO: 41927 - protein, 19 aa, Homo sapiens
CARDMGFTPANKNNAFDIW

SEQ ID NO: 41928 - protein, 16 aa, Homo sapiens
CARHGNSGWSYYFDHW

SEQ ID NO: 41929 - protein, 19 aa, Homo sapiens
CAREEAYYGPGDSGAFDIW

SEQ ID NO: 41930 - protein, 18 aa, Homo sapiens
CARQHPKYSSGWYQGDYW

SEQ ID NO: 41931 - protein, 12 aa, Homo sapiens
CARAQDYHFDHW

SEQ ID NO: 41932 - protein, 16 aa, Homo sapiens
CARHGRTLWLNWLDTW

SEQ ID NO: 41933 - protein, 23 aa, Homo sapiens
CARSKEGITVFGVVIEHDGFDTW

SEQ ID NO: 41934 - protein, 19 aa, Homo sapiens
CARDCTVTSCSGWHALDIW

SEQ ID NO: 41935 - protein, 16 aa, Homo sapiens
CARQRRLSNWSIFDSW

SEQ ID NO: 41936 - protein, 19 aa, Homo sapiens
CARDFPLLPGIAVAGPDYW

SEQ ID NO: 41937 - protein, 14 aa, Homo sapiens
CASVSSGWYTNDYW

SEQ ID NO: 41938 - protein, 20 aa, Homo sapiens
CARRGALRITESGNPYFDYW

SEQ ID NO: 41939 - protein, 19 aa, Homo sapiens
CARVRYGDRLYYYYGMDVW

SEQ ID NO: 41940 - protein, 18 aa, Homo sapiens
CAREKIQLWYQGGYFDYW

SEQ ID NO: 41941 - protein, 21 aa, Homo sapiens
CAKDKKYSSSWYDGGEGFDYW

SEQ ID NO: 41942 - protein, 22 aa, Homo sapiens
CAKGSYRRPPGRLTAPPSDDYW

SEQ ID NO: 41943 - protein, 14 aa, Homo sapiens
CQVWSNSSDHAVVF

SEQ ID NO: 41944 - protein, 19 aa, Homo sapiens
CAHMGGSRFSSSGWYLDYW

SEQ ID NO: 41945 - protein, 16 aa, Homo sapiens
CARDPANIVATTADYW

SEQ ID NO: 41946 - protein, 25 aa, Homo sapiens
CAKDRQPFYCSGGSCTPGSRGFDYW

SEQ ID NO: 41947 - protein, 13 aa, Homo sapiens
CARDRGYAKFDHW

SEQ ID NO: 41948 - protein, 23 aa, Homo sapiens
CARGSRLRYFDWLFGVGGAFDIW

SEQ ID NO: 41949 - protein, 16 aa, Homo sapiens
CAKAMTTVVTRYFDYW

SEQ ID NO: 41950 - protein, 18 aa, Homo sapiens
CAKDPSPHYNSGTYFDYW

SEQ ID NO: 41951 - protein, 20 aa, Homo sapiens
CAKTPQVLLWFGEFTSFDYW

SEQ ID NO: 41952 - protein, 22 aa, Homo sapiens
CARDRFDGYLGFLPPNDAFDIW

SEQ ID NO: 41953 - protein, 14 aa, Homo sapiens
CARGGRQLVYVDYW

SEQ ID NO: 41954 - protein, 14 aa, Homo sapiens
CARGSSGFMENDYW

SEQ ID NO: 41955 - protein, 16 aa, Homo sapiens
CARRAYGDYGLLADYW

SEQ ID NO: 41956 - protein, 30 aa, Homo sapiens
CARDLGRGPALYCSGDDCYSRGADVGFDIW

SEQ ID NO: 41957 - protein, 20 aa, Homo sapiens
CARDGATYYDFWSGQEIDYW

SEQ ID NO: 41958 - protein, 21 aa, Homo sapiens
CARAWVEGQWPLYYYYGMDVW

SEQ ID NO: 41959 - protein, 17 aa, Homo sapiens
CASPLGYSYGYGYFQHW

SEQ ID NO: 41960 - protein, 14 aa, Homo sapiens
CAREVTPGNWIDPW

SEQ ID NO: 41961 - protein, 17 aa, Homo sapiens
CAKDPGYEIVVVGFDYW

SEQ ID NO: 41962 - protein, 16 aa, Homo sapiens
CAREDSTMRQNHFDYW

SEQ ID NO: 41963 - protein, 15 aa, Homo sapiens
CARSIRNYYDAFEVW

SEQ ID NO: 41964 - protein, 23 aa, Homo sapiens
CARVCLTYYYGSGSYYPDAFDIW

SEQ ID NO: 41965 - protein, 21 aa, Homo sapiens
CARARAYDSSLDPWADAFDIW

SEQ ID NO: 41966 - protein, 17 aa, Homo sapiens
CARLDYCGGHCYLLDYW

SEQ ID NO: 41967 - protein, 18 aa, Homo sapiens
CARDGSFRYLEWLPLDYW

SEQ ID NO: 41968 - protein, 25 aa, Homo sapiens
CARDSITMVRGVMGYYYYYYGMDVW

SEQ ID NO: 41969 - protein, 16 aa, Homo sapiens [sequence omitted]

SEQ ID NO: 41970 - protein, 22 aa, Homo sapiens
CARGTRPRVEVAGTRPDAFDIW

SEQ ID NO: 41971 - protein, 23 aa, Homo sapiens
CAHRPTPPYYYDSSGLGLWFDPW

SEQ ID NO: 41972 - protein, 14 aa, Homo sapiens
CARSTTMAGAVDYW

SEQ ID NO: 41973 - protein, 14 aa, Homo sapiens
CVRDRGRPDGFDLW

SEQ ID NO: 41974 - protein, 22 aa, Homo sapiens
CARAAQIPLIVVVYYYYGMDVW

SEQ ID NO: 41975 - protein, 19 aa, Homo sapiens
CARRTNEGYSYGYVAFDIW

SEQ ID NO: 41976 - protein, 15 aa, Homo sapiens
CASLSAITAPGTDYW

SEQ ID NO: 41977 - protein, 20 aa, Homo sapiens
CARGGKALMTTVTPDAFDIW

SEQ ID NO: 41978 - protein, 20 aa, Homo sapiens
CARQRTSTGIVGATLDFDYW

SEQ ID NO: 41979 - protein, 23 aa, Homo sapiens
CARMTYDILGGYDTATTYRFDPW

SEQ ID NO: 41980 - protein, 15 aa, Homo sapiens
CARGGLLEAVPLDYW

SEQ ID NO: 41981 - protein, 17 aa, Homo sapiens
CTRVGYSSSRTSPLDYW

SEQ ID NO: 41982 - protein, 14 aa, Homo sapiens
CARDSLAATEYDYW

SEQ ID NO: 41983 - protein, 20 aa, Homo sapiens
CAHRSVESSGRLATLAFDYW

SEQ ID NO: 41984 - protein, 15 aa, Homo sapiens
CAKDSWIKVGLFDYW

SEQ ID NO: 41985 - protein, 15 aa, Homo sapiens
CARFLPTWTDAFDIW

SEQ ID NO: 41986 - protein, 20 aa, Homo sapiens
CAKFLYASMVEYGDAKGDYW

SEQ ID NO: 41987 - protein, 18 aa, Homo sapiens
CARGWSDTAMVDWYFDLW

SEQ ID NO: 41988 - protein, 17 aa, Homo sapiens
CAHQDIAPSKAVAFDYW

SEQ ID NO: 41989 - protein, 10 aa, Homo sapiens
CVSGYDFEYW

SEQ ID NO: 41990 - protein, 21 aa, Homo sapiens
CARGVPMLRGGMTPTSLLDYW

SEQ ID NO: 41991 - protein, 22 aa, Homo sapiens
CARDGGGSYQLLGYYYYGMDVW

SEQ ID NO: 41992 - protein, 12 aa, Homo sapiens
CAKTHRSDFDYW

SEQ ID NO: 41993 - protein, 15 aa, Homo sapiens
CAKVGSSSLGDFDLW

SEQ ID NO: 41994 - protein, 19 aa, Homo sapiens
CARALVRGVKGRDNWFDPW

SEQ ID NO: 41995 - protein, 15 aa, Homo sapiens
CARGTFWESRAFDLW

SEQ ID NO: 41996 - protein, 15 aa, Homo sapiens
CARGKLVYDYAFDIW

SEQ ID NO: 41997 - protein, 20 aa, Homo sapiens
CAREVVGYYGSGSYWYFDLW

SEQ ID NO: 41998 - protein, 16 aa, Homo sapiens
CATGLSAVRGIMRDYW

SEQ ID NO: 41999 - protein, 16 aa, Homo sapiens
CAKDIDAATRGYFDLW

SEQ ID NO: 42000 - protein, 26 aa, Homo sapiens
CAKGDSSSWYGGFAPPEYYYYGMDVW

SEQ ID NO: 42001 - protein, 25 aa, Homo sapiens
CARADYYYDSSIRPETQLSNAFDIW

SEQ ID NO: 42002 - protein, 20 aa, Homo sapiens
CARHSGAFGYGRAFVGIDYW

SEQ ID NO: 42003 - protein, 17 aa, Homo sapiens
CARHSDSSGWWNWFDPW

SEQ ID NO: 42004 - protein, 15 aa, Homo sapiens
CASIAVAGTYNFDYW

SEQ ID NO: 42005 - protein, 13 aa, Homo sapiens
CVRVWFAYYFDSW

SEQ ID NO: 42006 - protein, 17 aa, Homo sapiens
CARGSDNYPGKNGFDIW

SEQ ID NO: 42007 - protein, 15 aa, Homo sapiens
CARLVDTPLAFFDYW

SEQ ID NO: 42008 - protein, 22 aa, Homo sapiens
CARAAGRVTIFGVVIIRYFDYW

SEQ ID NO: 42009 - protein, 15 aa, Homo sapiens
CAKVSGGWWGYFDYW

SEQ ID NO: 42010 - protein, 14 aa, Homo sapiens
CARVGGGGYEHDYW

SEQ ID NO: 42011 - protein, 16 aa, Homo sapiens
CARVVVVAARKSIDYW

SEQ ID NO: 42012 - protein, 22 aa, Homo sapiens
CARGTPFGYGYYPYYNYYMDVW

SEQ ID NO: 42013 - protein, 16 aa, Homo sapiens
CVRLSWGPGRTGFDFW

SEQ ID NO: 42014 - protein, 22 aa, Homo sapiens
CARASKGEWFGELFAGNWFDPW

SEQ ID NO: 42015 - protein, 16 aa, Homo sapiens
CARTSRAYYPYYFDFW

SEQ ID NO: 42016 - protein, 23 aa, Homo sapiens
CTRPQEIYVDIVPSYDDHPFDYW

SEQ ID NO: 42017 - protein, 18 aa, Homo sapiens
CARIAVRGAPSLWWFDPW

SEQ ID NO: 42018 - protein, 16 aa, Homo sapiens
CARGRDTTMTTYFDYW

SEQ ID NO: 42019 - protein, 18 aa, Homo sapiens
CAKDQKWGIAAAHAFDIW

SEQ ID NO: 42020 - protein, 20 aa, Homo sapiens
CAALPTVDGTMGRDDAFDIW

SEQ ID NO: 42021 - protein, 16 aa, Homo sapiens
CAKNTQWLSLRAFDYW

SEQ ID NO: 42022 - protein, 17 aa, Homo sapiens
CARLRYSDSTHSSFDSW

SEQ ID NO: 42023 - protein, 17 aa, Homo sapiens
CAREITNIAAAGGFDPW

SEQ ID NO: 42024 - protein, 23 aa, Homo sapiens
CARDRGHSYCSGGSCYGNWFDPW

SEQ ID NO: 42025 - protein, 17 aa, Homo sapiens
CARVDCSSTSCAYFDYW

SEQ ID NO: 42026 - protein, 18 aa, Homo sapiens
CARLPRHSSSWPYFFDYW

SEQ ID NO: 42027 - protein, 15 aa, Homo sapiens
CASFDGPGQLLWDYW

SEQ ID NO: 42028 - protein, 23 aa, Homo sapiens
CARQQDTYYYGSGSYHVDYFDYW

SEQ ID NO: 42029 - protein, 24 aa, Homo sapiens
CAKALYDSTNYYFYYYYHYGLDVW

SEQ ID NO: 42030 - protein, 18 aa, Homo sapiens
CAKAAGPQSRHPYFFDSW

SEQ ID NO: 42031 - protein, 17 aa, Homo sapiens
CTRDLLDESGTDYHDFW

SEQ ID NO: 42032 - protein, 16 aa, Homo sapiens
CATPRTEWLRDAFDVW

SEQ ID NO: 42033 - protein, 17 aa, Homo sapiens
CARERRAAAVDYYFDYW

SEQ ID NO: 42034 - protein, 16 aa, Homo sapiens
CARPMSRSTLDAFDIW

SEQ ID NO: 42035 - protein, 21 aa, Homo sapiens
CARVYSSITIFGVVTRYFDYW

SEQ ID NO: 42036 - protein, 16 aa, Homo sapiens
CAKGAWVFSSSWADYW

SEQ ID NO: 42037 - protein, 19 aa, Homo sapiens
CAKAAFINSGYGIDAFDIW

SEQ ID NO: 42038 - protein, 16 aa, Homo sapiens
CARGRSAGGSYYFDYW

SEQ ID NO: 42039 - protein, 18 aa, Homo sapiens
CARHGIAVAEKHGYFDYW

SEQ ID NO: 42040 - protein, 22 aa, Homo sapiens
CARVAFYYDNSGSYLGGYFDYW

SEQ ID NO: 42041 - protein, 19 aa, Homo sapiens
CAREHTFGGGDVEIYFDSW

SEQ ID NO: 42042 - protein, 18 aa, Homo sapiens
CARVFRGSRREPKNFDYW

SEQ ID NO: 42043 - protein, 22 aa, Homo sapiens
CARDSPYGSGVGPPKRYAFDIW

SEQ ID NO: 42044 - protein, 14 aa, Homo sapiens
CARAHWVPLALDYW

SEQ ID NO: 42045 - protein, 21 aa, Homo sapiens
CARHPFTYAFGGVIVDAFDIW

SEQ ID NO: 42046 - protein, 18 aa, Homo sapiens
CTRADLGYSYVLDAFDIW

SEQ ID NO: 42047 - protein, 18 aa, Homo sapiens
CARDHLAVPAPGVSFDYW

SEQ ID NO: 42048 - protein, 17 aa, Homo sapiens
CAKDLNSAWGSVRFDYW

SEQ ID NO: 42049 - protein, 19 aa, Homo sapiens
CASFTMVRGVESGGHFDLW

SEQ ID NO: 42050 - protein, 17 aa, Homo sapiens
CAKDQYYDYVWGNLDYW

SEQ ID NO: 42051 - protein, 16 aa, Homo sapiens
CAKGGNKGQWPLVDYW

SEQ ID NO: 42052 - protein, 17 aa, Homo sapiens
CAHRLFSYGSGSAFDYW

SEQ ID NO: 42053 - protein, 23 aa, Homo sapiens
CAKVLTYYYDSSGYYYTGAFDYW

SEQ ID NO: 42054 - protein, 17 aa, Homo sapiens
CAKGSAVAGTDDAFDIW

SEQ ID NO: 42055 - protein, 21 aa, Homo sapiens
CAKASTARYSSGWSYTRYDYW

SEQ ID NO: 42056 - protein, 20 aa, Homo sapiens
CARDRGIQLWPGYYYGMDVW

SEQ ID NO: 42057 - protein, 20 aa, Homo sapiens
CARSPTRLVRGSGSGQFDNW

SEQ ID NO: 42058 - protein, 15 aa, Homo sapiens
CARDPGIGPSFFDIW

SEQ ID NO: 42059 - protein, 22 aa, Homo sapiens
CARGYPLLWFGELSLPGAFDIW

SEQ ID NO: 42060 - protein, 19 aa, Homo sapiens
CAKVLAVAGFYYYYGMDVW

SEQ ID NO: 42061 - protein, 23 aa, Homo sapiens
CARNPYYYHSSGYLPYYYGMDVW

SEQ ID NO: 42062 - protein, 22 aa, Homo sapiens
CARGNVLRYFDWFHRADHFDYW

SEQ ID NO: 42063 - protein, 16 aa, Homo sapiens
CARRTEAWFGHAFDIW

SEQ ID NO: 42064 - protein, 21 aa, Homo sapiens
CARVHYDILTGYYDSYGMDVW

SEQ ID NO: 42065 - protein, 15 aa, Homo sapiens
CTRETKFGAWWFDPW

SEQ ID NO: 42066 - protein, 20 aa, Homo sapiens
CAHRLEIAAAGRILYYMDVW

SEQ ID NO: 42067 - protein, 24 aa, Homo sapiens
CARTFDYDTAVNVKTPRGDGFDIW

SEQ ID NO: 42068 - protein, 18 aa, Homo sapiens
CARGWVPSKPIPNSFDIW

SEQ ID NO: 42069 - protein, 17 aa, Homo sapiens
CARGRSKILTSRYFDLW

SEQ ID NO: 42070 - protein, 20 aa, Homo sapiens
CVRDQNYNILTTYYDVFDIW

SEQ ID NO: 42071 - protein, 16 aa, Homo sapiens
CARDGPRIATTGCDYW

SEQ ID NO: 42072 - protein, 17 aa, Homo sapiens
CARGGPRKTYGSGFDIW

SEQ ID NO: 42073 - protein, 15 aa, Homo sapiens
CAHRRGDKGSCFDYW

SEQ ID NO: 42074 - protein, 12 aa, Homo sapiens
CQRYDALPALIF

SEQ ID NO: 42075 - protein, 20 aa, Homo sapiens
CASPGEQLWLGSYYYYMDVW

SEQ ID NO: 42076 - protein, 15 aa, Homo sapiens
CARTGGGSYYYMDVW

SEQ ID NO: 42077 - protein, 22 aa, Homo sapiens
CAKRNPKYYYDSSGYSMVVDYW

SEQ ID NO: 42078 - protein, 12 aa, Homo sapiens
CHQTYSTPQGTF

SEQ ID NO: 42079 - protein, 18 aa, Homo sapiens
CARDGSGSYSSYYYMDVW

SEQ ID NO: 42080 - protein, 24 aa, Homo sapiens
CARDRQQKWSLLRYFDWLLLEDYW

SEQ ID NO: 42081 - protein, 18 aa, Homo sapiens
CARVPPYSSGWEDAFDIW

SEQ ID NO: 42082 - protein, 16 aa, Homo sapiens
CATLGREQWLAKIDYW

SEQ ID NO: 42083 - protein, 18 aa, Homo sapiens
CAGYYDILTGYPDRFDYW

SEQ ID NO: 42084 - protein, 18 aa, Homo sapiens
CAKRAPTNWADNDIFDMW

SEQ ID NO: 42085 - protein, 18 aa, Homo sapiens
CARGLLWFGELPSYFDYW

SEQ ID NO: 42086 - protein, 18 aa, Homo sapiens
CARHFPPRHSGSHYFDAW

SEQ ID NO: 42087 - protein, 22 aa, Homo sapiens
CARDSDFWSGNYMAGPNWFDPW

SEQ ID NO: 42088 - protein, 18 aa, Homo sapiens
CARQSCSGGRCYWSFDYW

SEQ ID NO: 42089 - protein, 11 aa, Homo sapiens
CATVRYYFDSW

SEQ ID NO: 42090 - protein, 22 aa, Homo sapiens
CARGWTTMVRGVMRYHDAFDIW

SEQ ID NO: 42091 - protein, 19 aa, Homo sapiens
CAHRPPLGGSSWYRPFDYW

SEQ ID NO: 42092 - protein, 20 aa, Homo sapiens
CTTRERDITMVRGVIMIDYW

SEQ ID NO: 42093 - protein, 17 aa, Homo sapiens
CAKARIYGSGRSGFDIW

SEQ ID NO: 42094 - protein, 20 aa, Homo sapiens
CAKDPRWFGELFGPYYFDYW

SEQ ID NO: 42095 - protein, 14 aa, Homo sapiens
CVCNGDYDDAFDIW

SEQ ID NO: 42096 - protein, 16 aa, Homo sapiens
CACLNSYGHGGAFDYW

SEQ ID NO: 42097 - protein, 19 aa, Homo sapiens
CARHFPRQKWELPYHFDFW

SEQ ID NO: 42098 - protein, 17 aa, Homo sapiens
CARRLDQPWAGDAFDIW

SEQ ID NO: 42099 - protein, 13 aa, Homo sapiens
CASCGYSYGFHYW

SEQ ID NO: 42100 - protein, 15 aa, Homo sapiens
CARCQRLRPGWFDPW

SEQ ID NO: 42101 - protein, 19 aa, Homo sapiens
CARVKGTGYSYGQLLFDYW

SEQ ID NO: 42102 - protein, 17 aa, Homo sapiens
CTTDRLRLGDLGCFDSW

SEQ ID NO: 42103 - protein, 15 aa, Homo sapiens
CTKNFRSRDDAFDFW

SEQ ID NO: 42104 - protein, 16 aa, Homo sapiens
CARDLDQPGSQPFDYW

SEQ ID NO: 42105 - protein, 17 aa, Homo sapiens
CAKDGDDSRPPDAYDIW

SEQ ID NO: 42106 - protein, 16 aa, Homo sapiens
CARLYSSAVHWYFDLW

SEQ ID NO: 42107 - protein, 15 aa, Homo sapiens
CARRGELGSFYFDYW

SEQ ID NO: 42108 - protein, 20 aa, Homo sapiens
CARGPSSSGWGGDEYYFDSW

SEQ ID NO: 42109 - protein, 17 aa, Homo sapiens
CAKAGPKWHGPHYFDYW

SEQ ID NO: 42110 - protein, 19 aa, Homo sapiens
CARDEEFQFGDPLGWFDPW

SEQ ID NO: 42111 - protein, 21 aa, Homo sapiens
CARDLADLQRADTAMVTNDYW

SEQ ID NO: 42112 - protein, 15 aa, Homo sapiens
CAKDLGWLQLTFDYW

SEQ ID NO: 42113 - protein, 14 aa, Homo sapiens
CASETMTASAFDIW

SEQ ID NO: 42114 - protein, 16 aa, Homo sapiens
CAHNGARGYSYGYDYW

SEQ ID NO: 42115 - protein, 21 aa, Homo sapiens
CARRPLYTSTWSSSRGAFDMW

SEQ ID NO: 42116 - protein, 14 aa, Homo sapiens
CARLVVPAAMGDYW

SEQ ID NO: 42117 - protein, 15 aa, Homo sapiens
CVKDARDTGDAFDMW

SEQ ID NO: 42118 - protein, 19 aa, Homo sapiens
CAREGYSSSWFSYYYMDVW

SEQ ID NO: 42119 - protein, 16 aa, Homo sapiens
CAKEHFIAAAGIFDYW

SEQ ID NO: 42120 - protein, 16 aa, Homo sapiens
CARALRWGGQYYFDYW

SEQ ID NO: 42121 - protein, 18 aa, Homo sapiens
CARHGLYSSGSYVPFDYW

SEQ ID NO: 42122 - protein, 16 aa, Homo sapiens
CARLNYFGSAIFFDYW

SEQ ID NO: 42123 - protein, 21 aa, Homo sapiens
CGKDTGVDVVRGVMARNVDYW

SEQ ID NO: 42124 - protein, 21 aa, Homo sapiens
CARVMITFGGIIAHPYYFDYW

SEQ ID NO: 42125 - protein, 23 aa, Homo sapiens
CAKDARLVGITMIVVVLGGLDYW

SEQ ID NO: 42126 - protein, 21 aa, Homo sapiens
CARSVGMYSSTWYGLYYFDYW

SEQ ID NO: 42127 - protein, 14 aa, Homo sapiens
CATGPVTRDAFDIW

SEQ ID NO: 42128 - protein, 12 aa, Homo sapiens
CARGDRDYPDYW

SEQ ID NO: 42129 - protein, 27 aa, Homo sapiens
CARRGEEFGGSFGVVFFDSDSWYFDLW

SEQ ID NO: 42130 - protein, 26 aa, Homo sapiens
CARLPRMNSKYYDFWSGYYDWYFDLW

SEQ ID NO: 42131 - protein, 20 aa, Homo sapiens
CARGSSSWYIPSSNYYFDYW

SEQ ID NO: 42132 - protein, 16 aa, Homo sapiens
CVKDYMIGLATMFDYW

SEQ ID NO: 42133 - protein, 20 aa, Homo sapiens
CARALNYDILTGYGPLFDYW

SEQ ID NO: 42134 - protein, 20 aa, Homo sapiens
CAKAATRQQPYYYHYYMDVW

SEQ ID NO: 42135 - protein, 21 aa, Homo sapiens
CARFRRNLSWLPPPNDAFDVW

SEQ ID NO: 42136 - protein, 16 aa, Homo sapiens
CAKDMFAPVHTAFDIW

SEQ ID NO: 42137 - protein, 22 aa, Homo sapiens
CARHSNDDYYGSGSYQPQLDYW

SEQ ID NO: 42138 - protein, 24 aa, Homo sapiens
CARTLLQSIAARQVYYYYYGMDVW

SEQ ID NO: 42139 - protein, 17 aa, Homo sapiens
CARVGAVWGYGDIFDYW

SEQ ID NO: 42140 - protein, 17 aa, Homo sapiens
CTTVFWGHQDHDAFDIW

SEQ ID NO: 42141 - protein, 19 aa, Homo sapiens
CAKALVGSSGWYGDWFDPW

SEQ ID NO: 42142 - protein, 12 aa, Homo sapiens
CMQALQAPMCSF

SEQ ID NO: 42143 - protein, 18 aa, Homo sapiens
CARGVVVAATDPYYFDYW

SEQ ID NO: 42144 - protein, 19 aa, Homo sapiens
CARGSPNSEYSGYDWFDYW

SEQ ID NO: 42145 - protein, 14 aa, Homo sapiens
CARHYLTIEAFDFW

SEQ ID NO: 42146 - protein, 17 aa, Homo sapiens
CARHDSYGYFYGSPDYW

SEQ ID NO: 42147 - protein, 20 aa, Homo sapiens
CAKDLHSFGGAPTGDAFDVW

SEQ ID NO: 42148 - protein, 15 aa, Homo sapiens
CARPDILTGDYFAYW

SEQ ID NO: 42149 - protein, 18 aa, Homo sapiens
CAHRGPAAGTVGNAFDIW

SEQ ID NO: 42150 - protein, 20 aa, Homo sapiens
CARDSYYASGGYYYNWFDPW

SEQ ID NO: 42151 - protein, 16 aa, Homo sapiens
CAREGNGFGELTFDYW

SEQ ID NO: 42152 - protein, 24 aa, Homo sapiens
CARDRGIAVAGFLVPKYYYYMDVW

SEQ ID NO: 42153 - protein, 18 aa, Homo sapiens
CAKAPRLRYFDWLLFDYW

SEQ ID NO: 42154 - protein, 22 aa, Homo sapiens
CARDFKYQPSPHYYYYYGMDVW

SEQ ID NO: 42155 - protein, 21 aa, Homo sapiens
CARGLHARLWFGELYHWFDPW

SEQ ID NO: 42156 - protein, 22 aa, Homo sapiens
CARAWYSSSWYHGSYYYGMDVW

SEQ ID NO: 42157 - protein, 15 aa, Homo sapiens
CAMATVTPIYGFDVW

SEQ ID NO: 42158 - protein, 17 aa, Homo sapiens
CARGRYGPGERCYMDVW

SEQ ID NO: 42159 - protein, 17 aa, Homo sapiens
CVRDPILSTTWKTFDFW

SEQ ID NO: 42160 - protein, 20 aa, Homo sapiens
CAREAYVWGSYRHHNYFDYW

SEQ ID NO: 42161 - protein, 18 aa, Homo sapiens
CAKDRSGSYYPLGFFDLW

SEQ ID NO: 42162 - protein, 20 aa, Homo sapiens
CTTDRIYDYVWGSYRYGDYW

SEQ ID NO: 42163 - protein, 20 aa, Homo sapiens
CARARYPNSSSWYGGYFDSW

SEQ ID NO: 42164 - protein, 20 aa, Homo sapiens
CARLYYDYVWGVNQGAFDIW

SEQ ID NO: 42165 - protein, 21 aa, Homo sapiens
CARATGTQLLWLGEHRDFDYW

SEQ ID NO: 42166 - protein, 16 aa, Homo sapiens
CARTGGTFVNWYFDLW

SEQ ID NO: 42167 - protein, 17 aa, Homo sapiens
CVRVDNSGFYGDAFDMW

SEQ ID NO: 42168 - protein, 14 aa, Homo sapiens
CARVYSYGYPFDYW

SEQ ID NO: 42169 - protein, 16 aa, Homo sapiens
CAKDMWYSSTSGFDPW

SEQ ID NO: 42170 - protein, 19 aa, Homo sapiens
CARDGRIQLWFLGWAFDIW

SEQ ID NO: 42171 - protein, 15 aa, Homo sapiens
CAKGMLPQEWGFDYW

SEQ ID NO: 42172 - protein, 24 aa, Homo sapiens
CARHAKGITMVRGVIITPYYFDYW

SEQ ID NO: 42173 - protein, 18 aa, Homo sapiens
CARQDDNLTGFEDAFDIW

SEQ ID NO: 42174 - protein, 26 aa, Homo sapiens
CARGLRISMVRGVSSDRKNRNYFDYW

SEQ ID NO: 42175 - protein, 14 aa, Homo sapiens
CAKDGPKYSYGSYW

SEQ ID NO: 42176 - protein, 12 aa, Homo sapiens
CARDREAAADIW

SEQ ID NO: 42177 - protein, 16 aa, Homo sapiens
CARALDIAAAVDFDYW

SEQ ID NO: 42178 - protein, 17 aa, Homo sapiens
CASNVLEYYGQQLMDYW

SEQ ID NO: 42179 - protein, 24 aa, Homo sapiens
CARDIVVVVAATRYYYYYYGMDVW

SEQ ID NO: 42180 - protein, 15 aa, Homo sapiens
CARIPYSGYDPFDYW

SEQ ID NO: 42181 - protein, 17 aa, Homo sapiens
CARALLWFGEPNWFDPW

SEQ ID NO: 42182 - protein, 28 aa, Homo sapiens
CLRSDDTAVYYCASEKDYVQNWYNFDSW

SEQ ID NO: 42183 - protein, 17 aa, Homo sapiens
CARRAYSVSDYGVIDYW

SEQ ID NO: 42184 - protein, 15 aa, Homo sapiens
CVRTPFIASGTFDFW

SEQ ID NO: 42185 - protein, 19 aa, Homo sapiens
CARRSNWYTGFLLGVIDYW

SEQ ID NO: 42186 - protein, 20 aa, Homo sapiens
CTTRNTYYYDSSGYYTFDYW

SEQ ID NO: 42187 - protein, 22 aa, Homo sapiens
CTTVGRLSGLGSYYPVFYFEYW

SEQ ID NO: 42188 - protein, 13 aa, Homo sapiens
CAISVVTPAFDNW

SEQ ID NO: 42189 - protein, 17 aa, Homo sapiens
CATGGHYDYVWGTLDYW

SEQ ID NO: 42190 - protein, 21 aa, Homo sapiens
CATLYYYDSSGYYYWLAFDIW

SEQ ID NO: 42191 - protein, 21 aa, Homo sapiens
CATRSDTCVSTSCYQDAFDIW

SEQ ID NO: 42192 - protein, 17 aa, Homo sapiens
CAKHGDVVVIVAHFDPW

SEQ ID NO: 42193 - protein, 21 aa, Homo sapiens
CTRVLLYPGIAAAGLDGFDVW

SEQ ID NO: 42194 - protein, 22 aa, Homo sapiens
CARDRSGYSYGSPGPKYYMDVW

SEQ ID NO: 42195 - protein, 18 aa, Homo sapiens
CAREIWNPGNYYYGMDVW

SEQ ID NO: 42196 - protein, 21 aa, Homo sapiens
CARGREKHWSGSGSYYQFDHW

SEQ ID NO: 42197 - protein, 14 aa, Homo sapiens
CARVPGYPFFFDYW

SEQ ID NO: 42198 - protein, 20 aa, Homo sapiens
CAKDHAPGRNYYGSEGFDPW

SEQ ID NO: 42199 - protein, 19 aa, Homo sapiens
CARALRYFDWLSSDAFDIW

SEQ ID NO: 42200 - protein, 16 aa, Homo sapiens
CAREVPSLAVADFDYW

SEQ ID NO: 42201 - protein, 16 aa, Homo sapiens
CAREASSGSLYYFDSW

SEQ ID NO: 42202 - protein, 22 aa, Homo sapiens
CARGDCSSTSCYADYYYYMDVW

SEQ ID NO: 42203 - protein, 20 aa, Homo sapiens
CANPPTTMVRGVIDDAFDIW

SEQ ID NO: 42204 - protein, 16 aa, Homo sapiens
CVKDVQFSVAGTFDYW

SEQ ID NO: 42205 - protein, 21 aa, Homo sapiens
CAREVAYDILTGYPTYAFDIW

SEQ ID NO: 42206 - protein, 17 aa, Homo sapiens
CASQKPRISAYEAFDYW

SEQ ID NO: 42207 - protein, 20 aa, Homo sapiens
CARPGYDILTGYPPNYFDYW

SEQ ID NO: 42208 - protein, 19 aa, Homo sapiens
CARNNVLRYFDWLAPPDYW

SEQ ID NO: 42209 - protein, 18 aa, Homo sapiens
CAATPRSGTYYTWSFDIW

SEQ ID NO: 42210 - protein, 19 aa, Homo sapiens
CARDGEDYYDSREDAFDIW

SEQ ID NO: 42211 - protein, 20 aa, Homo sapiens
CARDSTVLRYFPRNWYFDLW

SEQ ID NO: 42212 - protein, 14 aa, Homo sapiens [sequence omitted]

SEQ ID NO: 42213 - protein, 19 aa, Homo sapiens
CAKHLYNWNYIVLGVFDSW

SEQ ID NO: 42214 - protein, 18 aa, Homo sapiens
CARESLGIAVADDAFDIW

SEQ ID NO: 42215 - protein, 18 aa, Homo sapiens
CASERGIDVAVPAPVDYW

SEQ ID NO: 42216 - protein, 18 aa, Homo sapiens
CARIRGYSYLDGFSFDIW

SEQ ID NO: 42217 - protein, 17 aa, Homo sapiens
CVKDRAPNQGTDAFDVW

SEQ ID NO: 42218 - protein, 21 aa, Homo sapiens
CATSSPHCSSTSCSTNWFDPW

SEQ ID NO: 42219 - protein, 14 aa, Homo sapiens
CARAQWGSGYFDLW

SEQ ID NO: 42220 - protein, 18 aa, Homo sapiens
CAKAGNYDILTGYYPWYW

SEQ ID NO: 42221 - protein, 14 aa, Homo sapiens
CARADFYGDYEVYW

SEQ ID NO: 42222 - protein, 12 aa, Homo sapiens
CQLANNFPPVAF

SEQ ID NO: 42223 - protein, 22 aa, Homo sapiens
CARGPWARTFGAVGFYYYMDVW

SEQ ID NO: 42224 - protein, 17 aa, Homo sapiens
CAREPGVWQQLDAFDIW

SEQ ID NO: 42225 - protein, 16 aa, Homo sapiens
CARGDEEYSLDGFDIW

SEQ ID NO: 42226 - protein, 22 aa, Homo sapiens
CARAYGYGLSTSCYDGCAFDIW

SEQ ID NO: 42227 - protein, 16 aa, Homo sapiens
CARVPGSPTNYYMDVW

SEQ ID NO: 42228 - protein, 19 aa, Homo sapiens
CARGRLIFVDREDTWFDPW

SEQ ID NO: 42229 - protein, 15 aa, Homo sapiens
CARVNYYGQLYFDYW

SEQ ID NO: 42230 - protein, 21 aa, Homo sapiens
CARCPYGPPLYKHRGNWFDPW

SEQ ID NO: 42231 - protein, 17 aa, Homo sapiens
CAREFVAETGLTTIDYW

SEQ ID NO: 42232 - protein, 18 aa, Homo sapiens
CARGRDGFNYYQNYYDYW

SEQ ID NO: 42233 - protein, 18 aa, Homo sapiens
CAKDNVWQWLVPYYFDYW

SEQ ID NO: 42234 - protein, 18 aa, Homo sapiens
CARDPGIDLWQFDYFDYW

SEQ ID NO: 42235 - protein, 25 aa, Homo sapiens
CAKVRPLYFDFWSGYSQRPYYFDYW

SEQ ID NO: 42236 - protein, 11 aa, Homo sapiens
CVQGLQIPLAF

SEQ ID NO: 42237 - protein, 14 aa, Homo sapiens
CARTDWISMYFDFW

SEQ ID NO: 42238 - protein, 20 aa, Homo sapiens
CARDRYDILTGYYSDAFDIW

SEQ ID NO: 42239 - protein, 25 aa, Homo sapiens
CARVPVDVGGTMVRGVIYYYGMDVW

SEQ ID NO: 42240 - protein, 23 aa, Homo sapiens
CAKGLPYEYSSSPWVQDDAFDMW

SEQ ID NO: 42241 - protein, 17 aa, Homo sapiens
CAREKLCGGDCYSSDYW

SEQ ID NO: 42242 - protein, 19 aa, Homo sapiens
CARASWIQLWSRGPEFDYW

SEQ ID NO: 42243 - protein, 22 aa, Homo sapiens
CTTDPTYYDYVWGSYREIFDYW

SEQ ID NO: 42244 - protein, 15 aa, Homo sapiens
CARDYGDGGLAFDYW

SEQ ID NO: 42245 - protein, 20 aa, Homo sapiens
CAKGIDILTGYRIRGAFDIW

SEQ ID NO: 42246 - protein, 20 aa, Homo sapiens
CARASRSEYSYAIGVWFDPW

SEQ ID NO: 42247 - protein, 17 aa, Homo sapiens
CARAPWDAVRVDYFDYW

SEQ ID NO: 42248 - protein, 14 aa, Homo sapiens
CARTLYLRNAFDIW

SEQ ID NO: 42249 - protein, 21 aa, Homo sapiens
CTTQLYGEALDYSYYYAMDVW

SEQ ID NO: 42250 - protein, 21 aa, Homo sapiens
CARETYCSGGSCYPPEYFQHW

SEQ ID NO: 42251 - protein, 21 aa, Homo sapiens
CARDSALAYYYDRSGYSLDYW

SEQ ID NO: 42252 - protein, 17 aa, Homo sapiens
CARDSRHSSGWSLVDYW

SEQ ID NO: 42253 - protein, 24 aa, Homo sapiens
CAREGQQRITIFGVVIISSYFDYW

SEQ ID NO: 42254 - protein, 23 aa, Homo sapiens
CARDATPSHYYDSSNTYDAFDIW

SEQ ID NO: 42255 - protein, 21 aa, Homo sapiens
CARDRIRITIFGVDPDYFDYW

SEQ ID NO: 42256 - protein, 18 aa, Homo sapiens
CARENRVYRYSSGHSDYW

SEQ ID NO: 42257 - protein, 21 aa, Homo sapiens
CAKDATENTWIELWFHGADYW

SEQ ID NO: 42258 - protein, 14 aa, Homo sapiens
CARGPGRRGINDYW

SEQ ID NO: 42259 - protein, 15 aa, Homo sapiens
CARDKRPEVDAFDIW

SEQ ID NO: 42260 - protein, 18 aa, Homo sapiens
CARGYCGGGSCPWYFDVW

SEQ ID NO: 42261 - protein, 17 aa, Homo sapiens
CVKSFFDISTGYYKDSW

SEQ ID NO: 42262 - protein, 15 aa, Homo sapiens
CVRVQETGTWAFDIW

SEQ ID NO: 42263 - protein, 16 aa, Homo sapiens
CAKVASSVDTGMIDYW

SEQ ID NO: 42264 - protein, 22 aa, Homo sapiens
CAKKGHSGYDLYIYYYYYMDVW

SEQ ID NO: 42265 - protein, 19 aa, Homo sapiens
CARRPGSLYSRGRDAFDIW

SEQ ID NO: 42266 - protein, 18 aa, Homo sapiens
CAHIMDYYESGRDAFDVW

SEQ ID NO: 42267 - protein, 20 aa, Homo sapiens
CARGPIVLLWFGELSGIDYW

SEQ ID NO: 42268 - protein, 17 aa, Homo sapiens
CARDVLSAAAGTGADYW

SEQ ID NO: 42269 - protein, 18 aa, Homo sapiens
CARGEHLWLYWKDAFDIW

SEQ ID NO: 42270 - protein, 20 aa, Homo sapiens
CARITHDPSTSWFPAHFDNW

SEQ ID NO: 42271 - protein, 18 aa, Homo sapiens
CARIARKWLDFYYYMDVW

SEQ ID NO: 42272 - protein, 14 aa, Homo sapiens
CAPFDDNVNWFDPW

SEQ ID NO: 42273 - protein, 19 aa, Homo sapiens
CARDQGYSGLDWTGAFDNW

SEQ ID NO: 42274 - protein, 19 aa, Homo sapiens
CARGGSSSWYLPPNYFDYW

SEQ ID NO: 42275 - protein, 18 aa, Homo sapiens
CAEGHYDSSGYYSRFEYW

SEQ ID NO: 42276 - protein, 18 aa, Homo sapiens
CAKVGPLGYSYGTYFDYW

SEQ ID NO: 42277 - protein, 15 aa, Homo sapiens
CARAPWGYSGPEDYW

SEQ ID NO: 42278 - protein, 21 aa, Homo sapiens
CAREKWITIFGVVITPAFDYW

SEQ ID NO: 42279 - protein, 16 aa, Homo sapiens
CAKVMGFGAQDAFDIW

SEQ ID NO: 42280 - protein, 16 aa, Homo sapiens
CTTAPYGDYGVPVDYW

SEQ ID NO: 42281 - protein, 16 aa, Homo sapiens
CAKTGYLGGARYLDSW

SEQ ID NO: 42282 - protein, 16 aa, Homo sapiens
CAKDAPVVVTAMFDYW

SEQ ID NO: 42283 - protein, 26 aa, Homo sapiens
CARHVRVGYCSGGSCYSLKTAPSDYW

SEQ ID NO: 42284 - protein, 21 aa, Homo sapiens
CARHRNDLGGGSYWEQPFDYW

SEQ ID NO: 42285 - protein, 17 aa, Homo sapiens
CAREGTREGRNDAFDVW

SEQ ID NO: 42286 - protein, 18 aa, Homo sapiens
CANTGIKYNSGGFYFEDW

SEQ ID NO: 42287 - protein, 19 aa, Homo sapiens
CAREGYDYVWGSYRYPDYW

SEQ ID NO: 42288 - protein, 20 aa, Homo sapiens
CAKVFHRGTMYYSSDYYDAW

SEQ ID NO: 42289 - protein, 16 aa, Homo sapiens
CARDFLRGTPDYFDSW

SEQ ID NO: 42290 - protein, 18 aa, Homo sapiens
CAKDRGSGIVGATACDYW

SEQ ID NO: 42291 - protein, 19 aa, Homo sapiens
CARGGELRGDWTHDAFNIW

SEQ ID NO: 42292 - protein, 26 aa, Homo sapiens
CSKAISHRWRYYYDSSGRYYYGMDVW

SEQ ID NO: 42293 - protein, 18 aa, Homo sapiens
CATSPPINWNDVSVWDYW

SEQ ID NO: 42294 - protein, 14 aa, Homo sapiens
CGRASSGYGPFDSW

SEQ ID NO: 42295 - protein, 25 aa, Homo sapiens
CARHGGAHYDILTGYYFGPGAFDIW

SEQ ID NO: 42296 - protein, 15 aa, Homo sapiens
CVKGMYYYGSDFDQW

SEQ ID NO: 42297 - protein, 21 aa, Homo sapiens
CAKASTYYFDSSGYSAYFDYW

SEQ ID NO: 42298 - protein, 17 aa, Homo sapiens
CARELNVDIGAYYFDYW

SEQ ID NO: 42299 - protein, 13 aa, Homo sapiens
CARAVVRGSFDHW

SEQ ID NO: 42300 - protein, 22 aa, Homo sapiens
CARGLAAAGPKFSLYYYGMDVW

SEQ ID NO: 42301 - protein, 17 aa, Homo sapiens
CAKDMRHGDYADGFDMW

SEQ ID NO: 42302 - protein, 18 aa, Homo sapiens
CARVAYTDSGIDSAFDFW

SEQ ID NO: 42303 - protein, 16 aa, Homo sapiens
CARAQLWGNIDAFDIW

SEQ ID NO: 42304 - protein, 19 aa, Homo sapiens
CARDAWGHSSSWDPHFDYW

SEQ ID NO: 42305 - protein, 26 aa, Homo sapiens
CARDTSWWGYYDSSGYYYKYNWFDPW

SEQ ID NO: 42306 - protein, 14 aa, Homo sapiens
CARYTSSFAKFDSW

SEQ ID NO: 42307 - protein, 17 aa, Homo sapiens
CARSSNFDRWYGTFDYW

SEQ ID NO: 42308 - protein, 22 aa, Homo sapiens
CARGSTTVRQITNNYYYYMDVW

SEQ ID NO: 42309 - protein, 15 aa, Homo sapiens
CARARIAVAYAADYW

SEQ ID NO: 42310 - protein, 14 aa, Homo sapiens
CVHSSHSAYDYDYW

SEQ ID NO: 42311 - protein, 17 aa, Homo sapiens
CAKEFFEWIVYGFFDNW

SEQ ID NO: 42312 - protein, 14 aa, Homo sapiens
CTTDRTWELPFDYW

SEQ ID NO: 42313 - protein, 20 aa, Homo sapiens
CARDSWPWRIELGYGAFDVW

SEQ ID NO: 42314 - protein, 18 aa, Homo sapiens
CAHRQLIYSEDQKYFDYW

SEQ ID NO: 42315 - protein, 13 aa, Homo sapiens
CARVRAVTHFDYW

SEQ ID NO: 42316 - protein, 18 aa, Homo sapiens
CGAGTGGIHTPINAFDIW

SEQ ID NO: 42317 - protein, 16 aa, Homo sapiens
CARVGFIRSKGGFDYW

SEQ ID NO: 42318 - protein, 13 aa, Homo sapiens
CARLLSGRPFDFW

SEQ ID NO: 42319 - protein, 17 aa, Homo sapiens
CARHAHTSDWAYYFDSW

SEQ ID NO: 42320 - protein, 11 aa, Homo sapiens
CQHYNHWPLIF

SEQ ID NO: 42321 - protein, 11 aa, Homo sapiens
CQYYGTSPRPF

SEQ ID NO: 42322 - protein, 21 aa, Homo sapiens
CVRDFEYCADGICSTADNDYW

SEQ ID NO: 42323 - protein, 16 aa, Homo sapiens
CTTDLGLLPGSYFDYW

SEQ ID NO: 42324 - protein, 17 aa, Homo sapiens
CTRRRGSGWPDYYFDIW

SEQ ID NO: 42325 - protein, 20 aa, Homo sapiens
CARTQNYPDGSGYTRYFDYW

SEQ ID NO: 42326 - protein, 20 aa, Homo sapiens
CARLGVVLRYFDWLQMIDYW

SEQ ID NO: 42327 - protein, 17 aa, Homo sapiens
CARAQSGGWATNWLDPW

SEQ ID NO: 42328 - protein, 15 aa, Homo sapiens
CARDRGPYDPRFDIW

SEQ ID NO: 42329 - protein, 16 aa, Homo sapiens
CARAVGFGILEFLDYW

SEQ ID NO: 42330 - protein, 21 aa, Homo sapiens
CAREGKYDWGYSYYYYGMDVW

SEQ ID NO: 42331 - protein, 23 aa, Homo sapiens
CARDWEYYDILTGYYTRYYMDVW

SEQ ID NO: 42332 - protein, 25 aa, Homo sapiens
CARGRGYYDILTGPWALDSPPGDYW

SEQ ID NO: 42333 - protein, 17 aa, Homo sapiens
CATARTIVAAAITNDYW

SEQ ID NO: 42334 - protein, 19 aa, Homo sapiens
CARAPSGSFRYYFYYMDVW

SEQ ID NO: 42335 - protein, 18 aa, Homo sapiens
CARGRDVYATGSQWFDPW

SEQ ID NO: 42336 - protein, 18 aa, Homo sapiens
CARGALPGAGGSDAFDIW

SEQ ID NO: 42337 - protein, 16 aa, Homo sapiens
CAKDTYYGSGNAFDIW

SEQ ID NO: 42338 - protein, 14 aa, Homo sapiens
CARDPGILNGFHYW

SEQ ID NO: 42339 - protein, 18 aa, Homo sapiens
CARDRPSYSMKAGSFDYW

SEQ ID NO: 42340 - protein, 17 aa, Homo sapiens
CARSYDYGSGTYGFDVW

SEQ ID NO: 42341 - protein, 18 aa, Homo sapiens
CAKELFINYASSPAFDIW

SEQ ID NO: 42342 - protein, 12 aa, Homo sapiens
CQQYNHWPQVTF

SEQ ID NO: 42343 - protein, 16 aa, Homo sapiens
CARARRMVRGALFDYW

SEQ ID NO: 42344 - protein, 13 aa, Homo sapiens [sequence omitted]

SEQ ID NO: 42345 - protein, 24 aa, Homo sapiens
CAKAVEKLIASRRWDYYYYGMGVW

SEQ ID NO: 42346 - protein, 19 aa, Homo sapiens
CARSLFSRYSSNWYAFDIW

SEQ ID NO: 42347 - protein, 17 aa, Homo sapiens
CGKDRDWGLLRDALDIW

SEQ ID NO: 42348 - protein, 20 aa, Homo sapiens
CAKDREWLRFESPGYYFDYW

SEQ ID NO: 42349 - protein, 25 aa, Homo sapiens
CARDRSLGITIFGVVSRPAYYFDYW

SEQ ID NO: 42350 - protein, 15 aa, Homo sapiens
CARPTGVSTMAFGIW

SEQ ID NO: 42351 - protein, 24 aa, Homo sapiens
CARGGYDILTGYRYPNYYYGMDVW

SEQ ID NO: 42352 - protein, 14 aa, Homo sapiens
CAHSWYPGNWFDPW

SEQ ID NO: 42353 - protein, 18 aa, Homo sapiens
CARDVLLHFDTAGGLDYW

SEQ ID NO: 42354 - protein, 15 aa, Homo sapiens
CAREDDSSSLLFDYW

SEQ ID NO: 42355 - protein, 14 aa, Homo sapiens
CARYGGPPSSLDYW

SEQ ID NO: 42356 - protein, 21 aa, Homo sapiens
CASQALYCSGGSCYTDYFDYW

SEQ ID NO: 42357 - protein, 20 aa, Homo sapiens
CARAEGAVVRGVIIRAFDRW

SEQ ID NO: 42358 - protein, 19 aa, Homo sapiens
CAVMRGQRWLLTLRAFDVW

SEQ ID NO: 42359 - protein, 16 aa, Homo sapiens
CTRDGPNRYSSGPDYW

SEQ ID NO: 42360 - protein, 17 aa, Homo sapiens
CARSRITMVRVDAYDVW

SEQ ID NO: 42361 - protein, 21 aa, Homo sapiens
CARGLKYCTDGTCYSDAFDIW

SEQ ID NO: 42362 - protein, 22 aa, Homo sapiens
CATLMVSHLYDSGNYYGVFDIW

SEQ ID NO: 42363 - protein, 24 aa, Homo sapiens
CAKDMNYYGSGSYHYYYYYYMDVW

SEQ ID NO: 42364 - protein, 25 aa, Homo sapiens
CARGSPKRRNYYGSGSYYNVAFDIW

SEQ ID NO: 42365 - protein, 13 aa, Homo sapiens
CATEGELNAFDIW

SEQ ID NO: 42366 - protein, 26 aa, Homo sapiens
CARDKPYSSRPKTFIFPGEAVYFQHW

SEQ ID NO: 42367 - protein, 20 aa, Homo sapiens
CARPALSFGSTVTGDWFDPW

SEQ ID NO: 42368 - protein, 18 aa, Homo sapiens
CVKVGGHYGSDRNAFDVW

SEQ ID NO: 42369 - protein, 19 aa, Homo sapiens
CARLRGGYHASWYSAFDIW

SEQ ID NO: 42370 - protein, 21 aa, Homo sapiens
CARGSYGSGSYGVYYYGMDVW

SEQ ID NO: 42371 - protein, 16 aa, Homo sapiens
CAKDRSSYSSSPFDYW

SEQ ID NO: 42372 - protein, 11 aa, Homo sapiens
CQQLNRYTSSF

SEQ ID NO: 42373 - protein, 13 aa, Homo sapiens
CARVGYSNPIDYW

SEQ ID NO: 42374 - protein, 17 aa, Homo sapiens
CAKGLQPHDYGDSFDYW

SEQ ID NO: 42375 - protein, 19 aa, Homo sapiens
CARDMYYYDSSGSSAVDYW

SEQ ID NO: 42376 - protein, 20 aa, Homo sapiens
CAKEHTMSRRGYYYYYMDVW

SEQ ID NO: 42377 - protein, 18 aa, Homo sapiens
CTTDFSMTVAGPSYFDHW

SEQ ID NO: 42378 - protein, 24 aa, Homo sapiens
CASNLYYGSGSYSVPYYYYGMDVW

SEQ ID NO: 42379 - protein, 15 aa, Homo sapiens
CAKDIHLDNTATDYW

SEQ ID NO: 42380 - protein, 13 aa, Homo sapiens
CATATIHYYMDVW

SEQ ID NO: 42381 - protein, 16 aa, Homo sapiens
CAKTPGIATSWYFDLW

SEQ ID NO: 42382 - protein, 19 aa, Homo sapiens
CARLKTTFGVVKTAIFDFW

SEQ ID NO: 42383 - protein, 15 aa, Homo sapiens
CAKLGAAGGKYFDYW

SEQ ID NO: 42384 - protein, 19 aa, Homo sapiens
CAKDIVPTSFSAPVGFDVW

SEQ ID NO: 42385 - protein, 20 aa, Homo sapiens
CARGPYSSSWYGVRNWFDPW

SEQ ID NO: 42386 - protein, 18 aa, Homo sapiens
CARDPNWNYGIPDSFDLW

SEQ ID NO: 42387 - protein, 19 aa, Homo sapiens
CANFLSGSYWDYYYGMDVW

SEQ ID NO: 42388 - protein, 19 aa, Homo sapiens
CARHVRRHELWVAGDFDYW

SEQ ID NO: 42389 - protein, 15 aa, Homo sapiens
CAGANWAGLVDFDYW

SEQ ID NO: 42390 - protein, 13 aa, Homo sapiens
CAHLIQLRAFDIW

SEQ ID NO: 42391 - protein, 16 aa, Homo sapiens
CAKDGPTWIQLRFGYW

SEQ ID NO: 42392 - protein, 20 aa, Homo sapiens
CARPPAANSYDGTTYYFGLW

SEQ ID NO: 42393 - protein, 14 aa, Homo sapiens
CARSSYGYSWFDPW

SEQ ID NO: 42394 - protein, 21 aa, Homo sapiens
CARGPLYWWVVIQLSDAFDIW

SEQ ID NO: 42395 - protein, 17 aa, Homo sapiens
CARDRFTFRGGNYFDPW

SEQ ID NO: 42396 - protein, 21 aa, Homo sapiens
CARGPHYSDRSGYYRPYFDYW

SEQ ID NO: 42397 - protein, 21 aa, Homo sapiens
CAKPSGDRNTNLYYFYYMDAW

SEQ ID NO: 42398 - protein, 21 aa, Homo sapiens
CARDQFAASGVIPPNDPFDLW

SEQ ID NO: 42399 - protein, 17 aa, Homo sapiens
CATPRVDYSNYGPFDYW

SEQ ID NO: 42400 - protein, 21 aa, Homo sapiens
CARGMGVSYGSLNYYAYFDYW

SEQ ID NO: 42401 - protein, 17 aa, Homo sapiens
CARGGRNFYDVRGFDSW

SEQ ID NO: 42402 - protein, 19 aa, Homo sapiens
CAREGYNFWAIGGDYFDYW

SEQ ID NO: 42403 - protein, 20 aa, Homo sapiens
CAHRHRGEVGSPPRQWFDPW

SEQ ID NO: 42404 - protein, 12 aa, Homo sapiens
CHQPNSFPSYTF

SEQ ID NO: 42405 - protein, 18 aa, Homo sapiens
CAKDLRQWGWLPFYFDTW

SEQ ID NO: 42406 - protein, 16 aa, Homo sapiens
CARGNYYGSGSYYHYW

SEQ ID NO: 42407 - protein, 17 aa, Homo sapiens
CAREDYSPHSHDAFDIW

SEQ ID NO: 42408 - protein, 17 aa, Homo sapiens
CVRDSREWQVLGIFDIW

SEQ ID NO: 42409 - protein, 17 aa, Homo sapiens
CARGVESSSWPPASDYW

SEQ ID NO: 42410 - protein, 16 aa, Homo sapiens
CVKDPYMSTWGFFEYW

SEQ ID NO: 42411 - protein, 18 aa, Homo sapiens
CARVGRWVVGTTGLIDYW

SEQ ID NO: 42412 - protein, 17 aa, Homo sapiens
CAKDRLQWTLRGAFDLW

SEQ ID NO: 42413 - protein, 22 aa, Homo sapiens
CARDPGYCSDTDCYFENYFDYW

SEQ ID NO: 42414 - protein, 16 aa, Homo sapiens
CARQSSGWFMSFFDPW

SEQ ID NO: 42415 - protein, 16 aa, Homo sapiens
CARKVVAYREYYMDVW

SEQ ID NO: 42416 - protein, 21 aa, Homo sapiens
CARVESYREVVAAKGTPFGYW

SEQ ID NO: 42417 - protein, 16 aa, Homo sapiens
CARDKSYYDSRGFDLW

SEQ ID NO: 42418 - protein, 20 aa, Homo sapiens
CARADYDILTGYSKWWFDPW

SEQ ID NO: 42419 - protein, 14 aa, Homo sapiens
CARGNYGDYPYDYW

SEQ ID NO: 42420 - protein, 19 aa, Homo sapiens
CTRAPIRAAGGRGGFFDNW

SEQ ID NO: 42421 - protein, 15 aa, Homo sapiens
CASAAGFGESHFDFW

SEQ ID NO: 42422 - protein, 17 aa, Homo sapiens
CAKDLYDSSGYSPFDSW

SEQ ID NO: 42423 - protein, 19 aa, Homo sapiens
CARDATTYYYGSESYLDFW

SEQ ID NO: 42424 - protein, 13 aa, Homo sapiens
CHSADSSDAYWMF

SEQ ID NO: 42425 - protein, 22 aa, Homo sapiens
CARSFGSGTYYHWTYYYYMDVW

SEQ ID NO: 42426 - protein, 22 aa, Homo sapiens
CATEISSFSLELAAAYYYLDYW

SEQ ID NO: 42427 - protein, 12 aa, Homo sapiens
CTFGYPNWFDPW

SEQ ID NO: 42428 - protein, 16 aa, Homo sapiens
CATILWHAGSNWLDPW

SEQ ID NO: 42429 - protein, 22 aa, Homo sapiens
CVKDRSRRCDLLTCYSSGFDMW

SEQ ID NO: 42430 - protein, 18 aa, Homo sapiens
CAKVKDRVAAASSFFDHW

SEQ ID NO: 42431 - protein, 18 aa, Homo sapiens
CARTLKTYNWKLSWFDPW

SEQ ID NO: 42432 - protein, 18 aa, Homo sapiens
CAREDSNGYYYQDAFDLW

SEQ ID NO: 42433 - protein, 24 aa, Homo sapiens
CVRDRDILVVVDATQDYYSYMDVW

SEQ ID NO: 42434 - protein, 16 aa, Homo sapiens
CAKLITVAVSPAFDIW

SEQ ID NO: 42435 - protein, 21 aa, Homo sapiens
CARQQKSSNWYHKEVGAFDLW

SEQ ID NO: 42436 - protein, 21 aa, Homo sapiens
CAKSYYDNSGYYYRSRFLDYW

SEQ ID NO: 42437 - protein, 17 aa, Homo sapiens
CASGSSGSYWLWGFDYW

SEQ ID NO: 42438 - protein, 19 aa, Homo sapiens
CAKDRGLFYFDSTDYPDSW

SEQ ID NO: 42439 - protein, 16 aa, Homo sapiens
CARNDYGDFVSWFDPW

SEQ ID NO: 42440 - protein, 13 aa, Homo sapiens
CARDSHRYTFDVW

SEQ ID NO: 42441 - protein, 20 aa, Homo sapiens
CVKDRWLFDVSTGNDALDMW

SEQ ID NO: 42442 - protein, 28 aa, Homo sapiens
CARDPRVQYNTFWSAYGGGYFYYYMDVW

SEQ ID NO: 42443 - protein, 15 aa, Homo sapiens
CARSDCGGDCYPEYW

SEQ ID NO: 42444 - protein, 22 aa, Homo sapiens
CARVGNYYDSSGYPGAEYFQQW

SEQ ID NO: 42445 - protein, 15 aa, Homo sapiens
CVSGKGSGRHHFEYW

SEQ ID NO: 42446 - protein, 21 aa, Homo sapiens
CARNALRRSYSGHNSVDFDYW

SEQ ID NO: 42447 - protein, 19 aa, Homo sapiens
CARSPSYYGSGSWSWFDPW

SEQ ID NO: 42448 - protein, 17 aa, Homo sapiens
CARGDAVVITGYDFDYW

SEQ ID NO: 42449 - protein, 15 aa, Homo sapiens
CGSGGCNGDWYFDLW

SEQ ID NO: 42450 - protein, 22 aa, Homo sapiens
CAKVAAFREFIVATIANAFDIW

SEQ ID NO: 42451 - protein, 15 aa, Homo sapiens
CAKGLQLLADGFDFW

SEQ ID NO: 42452 - protein, 22 aa, Homo sapiens
CVKVDADSSGSYYGGVYYFDYW

SEQ ID NO: 42453 - protein, 17 aa, Homo sapiens
CARGFPPMVGAPYFAYW

SEQ ID NO: 42454 - protein, 13 aa, Homo sapiens
CQRYGYSPLIFTF

SEQ ID NO: 42455 - protein, 21 aa, Homo sapiens
CAKTSGLWSYYDSAGYSFDHW

SEQ ID NO: 42456 - protein, 18 aa, Homo sapiens
CVKALYIWGSYRSAFDVW

SEQ ID NO: 42457 - protein, 21 aa, Homo sapiens
CAKPVNHDSDSRGFYWGFEYW

SEQ ID NO: 42458 - protein, 22 aa, Homo sapiens
CARVPLVGPIVGRNDGRAFDFW

SEQ ID NO: 42459 - protein, 15 aa, Homo sapiens
CAIPRDRGGFYFDLW

SEQ ID NO: 42460 - protein, 15 aa, Homo sapiens
CQVWDNISDHPEWVF

SEQ ID NO: 42461 - protein, 21 aa, Homo sapiens
CARDFLRFSGDYYYSYYMDVW

SEQ ID NO: 42462 - protein, 13 aa, Homo sapiens
CARGDFVDAYDIW

SEQ ID NO: 42463 - protein, 17 aa, Homo sapiens
CAKDLTYDSNDWYLDLW

SEQ ID NO: 42464 - protein, 17 aa, Homo sapiens
CATFNTYDIGTFYFDYW

SEQ ID NO: 42465 - protein, 18 aa, Homo sapiens
CARDRRVGYYDSSGFDYW

SEQ ID NO: 42466 - protein, 13 aa, Homo sapiens
CQSRDSSPSGYLF

SEQ ID NO: 42467 - protein, 16 aa, Homo sapiens
CARQPKWGSNWNFDLW

SEQ ID NO: 42468 - protein, 17 aa, Homo sapiens
CVRGGHVHESSPPFAYW

SEQ ID NO: 42469 - protein, 15 aa, Homo sapiens
CARDYTLWNRYFDLW

SEQ ID NO: 42470 - protein, 16 aa, Homo sapiens
CARAFLYGGYWYFDLW

SEQ ID NO: 42471 - protein, 18 aa, Homo sapiens
CARRGYRRVVIVDAFDLW

SEQ ID NO: 42472 - protein, 18 aa, Homo sapiens
CARHHAKTDYSEGPFDTW

SEQ ID NO: 42473 - protein, 21 aa, Homo sapiens
CARDGACDSSSCYTAAQFDLW

SEQ ID NO: 42474 - protein, 19 aa, Homo sapiens
CAKAYASGPLPRLTYFDSW

SEQ ID NO: 42475 - protein, 16 aa, Homo sapiens
CARHRIPVATTAFDQW

SEQ ID NO: 42476 - protein, 15 aa, Homo sapiens
CTRGAWRGRPAFDLW

SEQ ID NO: 42477 - protein, 13 aa, Homo sapiens
CASFRELRIFEYW

SEQ ID NO: 42478 - protein, 18 aa, Homo sapiens
CARQGTRGSGRFEYFDYW

SEQ ID NO: 42479 - protein, 19 aa, Homo sapiens
CARDDSMMVGATKYAFDIW

SEQ ID NO: 42480 - protein, 21 aa, Homo sapiens
CARDYGSSWPRVTYFYYMDVW

SEQ ID NO: 42481 - protein, 15 aa, Homo sapiens
CARGRFGDLLPIDYW

SEQ ID NO: 42482 - protein, 22 aa, Homo sapiens
CARHAPREYCNGAFCLEYFQHW

SEQ ID NO: 42483 - protein, 14 aa, Homo sapiens
CARRVSLRGWNDYW

SEQ ID NO: 42484 - protein, 14 aa, Homo sapiens
CQVWDSSGGHPVVF

SEQ ID NO: 42485 - protein, 15 aa, Homo sapiens
CARVFSGGGGTLDYW

SEQ ID NO: 42486 - protein, 18 aa, Homo sapiens
CAKELQMWPPEEIVFDSW

SEQ ID NO: 42487 - protein, 13 aa, Homo sapiens
CARAAGATAFDSW

SEQ ID NO: 42488 - protein, 17 aa, Homo sapiens
CARDEGTVPGLYYFDSW

SEQ ID NO: 42489 - protein, 17 aa, Homo sapiens
CAREEVGGSGIYYFDYW

SEQ ID NO: 42490 - protein, 16 aa, Homo sapiens
CARHRLHLSGDVFDVW

SEQ ID NO: 42491 - protein, 24 aa, Homo sapiens
CARHHHYYDSGSYYQYYSYYMDVW

SEQ ID NO: 42492 - protein, 18 aa, Homo sapiens
CARDLGSVVTLPGWFDPW

SEQ ID NO: 42493 - protein, 22 aa, Homo sapiens
CARHTQGRYYGSGSYYNSWDYW

SEQ ID NO: 42494 - protein, 16 aa, Homo sapiens
CARVQVELPSGWFDPW

SEQ ID NO: 42495 - protein, 19 aa, Homo sapiens
CAKDRGDVAYYGSGRPDYW

SEQ ID NO: 42496 - protein, 19 aa, Homo sapiens
CARDAPPFYDLLNDGFDYW

SEQ ID NO: 42497 - protein, 17 aa, Homo sapiens
CARDAVEYSYGDWFDLW

SEQ ID NO: 42498 - protein, 16 aa, Homo sapiens
CARVDVWGSYRYNDYW

SEQ ID NO: 42499 - protein, 19 aa, Homo sapiens
CAKDGPLSSYGSGTWFDYW

SEQ ID NO: 42500 - protein, 12 aa, Homo sapiens
CMQCTPWPRWTF

SEQ ID NO: 42501 - protein, 21 aa, Homo sapiens
CAKDSRLNFYDSRASLSLDYW

SEQ ID NO: 42502 - protein, 19 aa, Homo sapiens
CAKGSGESGYDLVDGFDEW

SEQ ID NO: 42503 - protein, 19 aa, Homo sapiens
CARQELRDFDWTPRDFDSW

SEQ ID NO: 42504 - protein, 14 aa, Homo sapiens
CTRDLGGSFKFDYW

SEQ ID NO: 42505 - protein, 17 aa, Homo sapiens
CARKGRPGILADGFDIW

SEQ ID NO: 42506 - protein, 22 aa, Homo sapiens
CARSYYFDSSEYFSANDAFDIW

SEQ ID NO: 42507 - protein, 17 aa, Homo sapiens
CATPRGVVVSGRSFDFW

SEQ ID NO: 42508 - protein, 22 aa, Homo sapiens
CAKDLWDYGGNTGYYYYYMDVW

SEQ ID NO: 42509 - protein, 23 aa, Homo sapiens
CARESWFDNLGYYYGRRDVIDVW

SEQ ID NO: 42510 - protein, 16 aa, Homo sapiens
CARATEGDYGDYIDFW

SEQ ID NO: 42511 - protein, 16 aa, Homo sapiens
CAHTYSSSPPDPFDHW

SEQ ID NO: 42512 - protein, 21 aa, Homo sapiens
CAHRMQFCSTTTCHGGWFDPW

SEQ ID NO: 42513 - protein, 18 aa, Homo sapiens
CAKGSDVYSSSLDYMDVW

SEQ ID NO: 42514 - protein, 18 aa, Homo sapiens
CARQGYGGKWGRDAFDIW

SEQ ID NO: 42515 - protein, 13 aa, Homo sapiens
CARPHRLQYMDVW

SEQ ID NO: 42516 - protein, 22 aa, Homo sapiens
CASLYYVRGARSLVLDDTFDLW

SEQ ID NO: 42517 - protein, 22 aa, Homo sapiens
CATIPCSGGSCYSGVEYYFDYW

SEQ ID NO: 42518 - protein, 21 aa, Homo sapiens
CVRQNFNFWSGYLQYYYMDVW

SEQ ID NO: 42519 - protein, 18 aa, Homo sapiens
CARDGESHYNFWSGYDYW

SEQ ID NO: 42520 - protein, 12 aa, Homo sapiens
CARSLSGDHDYW

SEQ ID NO: 42521 - protein, 14 aa, Homo sapiens
CARGTNARYRFDPW

SEQ ID NO: 42522 - protein, 16 aa, Homo sapiens
CAKTRDWELLPDFDFW

SEQ ID NO: 42523 - protein, 19 aa, Homo sapiens
CAKVPEGYYYDSTGPLDYW

SEQ ID NO: 42524 - protein, 21 aa, Homo sapiens
CAKSVLSFREIVVVPAALDYW

SEQ ID NO: 42525 - protein, 21 aa, Homo sapiens
CAKNSAGYSPEYYYYYYMDVW

SEQ ID NO: 42526 - protein, 16 aa, Homo sapiens
CARDVEWLRFRGFDIW

SEQ ID NO: 42527 - protein, 20 aa, Homo sapiens
CTTILTTAGFSYYYYYMDVW

SEQ ID NO: 42528 - protein, 16 aa, Homo sapiens
CVRWSVTAGAEYFQHW

SEQ ID NO: 42529 - protein, 16 aa, Homo sapiens
CARDLRYLGGFSFDYW

SEQ ID NO: 42530 - protein, 17 aa, Homo sapiens
CARPYCRNNTCYAFDIW

SEQ ID NO: 42531 - protein, 11 aa, Homo sapiens [sequence omitted]

SEQ ID NO: 42532 - protein, 13 aa, Homo sapiens
CTKDFRPGGADYW

SEQ ID NO: 42533 - protein, 21 aa, Homo sapiens
CARKRHSSGRLARHYYYMDVW

SEQ ID NO: 42534 - protein, 21 aa, Homo sapiens
CARNFRDGFNYISLRCPFDFW

SEQ ID NO: 42535 - protein, 17 aa, Homo sapiens
CARGSPPWTTLRDFDYW

SEQ ID NO: 42536 - protein, 16 aa, Homo sapiens
CAKEAYSSGWYYCDQW

SEQ ID NO: 42537 - protein, 21 aa, Homo sapiens
CARLRSGYSLQYGRTLDFDQW

SEQ ID NO: 42538 - protein, 22 aa, Homo sapiens
CARQYLHYDVLSGYSPYYMDLW

SEQ ID NO: 42539 - protein, 16 aa, Homo sapiens
CARGGDFGDYDWFDSW

SEQ ID NO: 42540 - protein, 15 aa, Homo sapiens
CARVRAGLGNAFDVW

SEQ ID NO: 42541 - protein, 17 aa, Homo sapiens
CARDGPYDTSGYHFDYW

SEQ ID NO: 42542 - protein, 20 aa, Homo sapiens
CARDPGSPDSSGYLGYFDDW

SEQ ID NO: 42543 - protein, 21 aa, Homo sapiens
CARNYPLPMVRGVIPQLIDYW

SEQ ID NO: 42544 - protein, 16 aa, Homo sapiens
CARIGFSDNSGRFDYW

SEQ ID NO: 42545 - protein, 15 aa, Homo sapiens
CAISPSFRGSYFEFW

SEQ ID NO: 42546 - protein, 14 aa, Homo sapiens
CARQGVIADGFDVW

SEQ ID NO: 42547 - protein, 17 aa, Homo sapiens
CAREGYYYDSGSRVDYW

SEQ ID NO: 42548 - protein, 12 aa, Homo sapiens
CARFPVDAFDLW

SEQ ID NO: 42549 - protein, 20 aa, Homo sapiens
CVREASFSRGWYPFYPFDYW

SEQ ID NO: 42550 - protein, 19 aa, Homo sapiens
CARGGDSSGWFTTYFFDNW

SEQ ID NO: 42551 - protein, 21 aa, Homo sapiens
CARGGRPMVLGVIQNYYMDVW

SEQ ID NO: 42552 - protein, 24 aa, Homo sapiens
CARGRLAGSGYDRDYYYYYYMDVW

SEQ ID NO: 42553 - protein, 26 aa, Homo sapiens
CARGNRLGGPSTRLSIMGPPPRFDFW

SEQ ID NO: 42554 - protein, 22 aa, Homo sapiens
CARRGRWGVEPGAIWRGLFDPW

SEQ ID NO: 42555 - protein, 14 aa, Homo sapiens
CARVFSGSRLFEYW

SEQ ID NO: 42556 - protein, 18 aa, Homo sapiens
CARDGWTHLTNYSYFDYW

SEQ ID NO: 42557 - protein, 17 aa, Homo sapiens
CAKGVLISSVGDWFDPW

SEQ ID NO: 42558 - protein, 23 aa, Homo sapiens
CARGGPVTDDILTGYYLYYFDYW

SEQ ID NO: 42559 - protein, 19 aa, Homo sapiens
CARDQTPITMVRGDVLDYW

SEQ ID NO: 42560 - protein, 22 aa, Homo sapiens
CAKGPESTYYYESRGYYFVDYW

SEQ ID NO: 42561 - protein, 18 aa, Homo sapiens
CARGGDSYGIIYNWFDPW

SEQ ID NO: 42562 - protein, 16 aa, Homo sapiens
CASRPPLRDSSWSDYW

SEQ ID NO: 42563 - protein, 15 aa, Homo sapiens
CARDRDGRSPFFDDW

SEQ ID NO: 42564 - protein, 19 aa, Homo sapiens
CARPRSFGSMRRFWYFDYW

SEQ ID NO: 42565 - protein, 16 aa, Homo sapiens
CAKGMSYSSGRIIDYW

SEQ ID NO: 42566 - protein, 18 aa, Homo sapiens
CARGALLFGELKYYFDYW

SEQ ID NO: 42567 - protein, 15 aa, Homo sapiens
CATDPNSSSDAFDIW

SEQ ID NO: 42568 - protein, 13 aa, Homo sapiens
CNCRHSSGNHWMF

SEQ ID NO: 42569 - protein, 21 aa, Homo sapiens
CVRDRGLYGSGTSYTEYLDSW

SEQ ID NO: 42570 - protein, 20 aa, Homo sapiens
CAKYGLRYSDWLPSGPPDYW

SEQ ID NO: 42571 - protein, 20 aa, Homo sapiens
CARADLTTRSPSYYYYMDVW

SEQ ID NO: 42572 - protein, 13 aa, Homo sapiens
CATISEYVYFDSW

SEQ ID NO: 42573 - protein, 19 aa, Homo sapiens
CARVAGGSGSYYNEGLDYW

SEQ ID NO: 42574 - protein, 17 aa, Homo sapiens
CTHTVVDPLYFYYMDVW

SEQ ID NO: 42575 - protein, 12 aa, Homo sapiens
CAKGILASFDQW

SEQ ID NO: 42576 - protein, 20 aa, Homo sapiens
CARQLFCTSSTCYLGWFAPW

SEQ ID NO: 42577 - protein, 18 aa, Homo sapiens
CKTFRVVAAGRTRWFDAW

SEQ ID NO: 42578 - protein, 18 aa, Homo sapiens
CARHPINYGSGSPHFDSW

SEQ ID NO: 42579 - protein, 16 aa, Homo sapiens
CARDEMGATYDAFDIW

SEQ ID NO: 42580 - protein, 16 aa, Homo sapiens
CARVRAGYVYGPFDYW

SEQ ID NO: 42581 - protein, 19 aa, Homo sapiens
CARAGYYPQSYYYYYMDVW

SEQ ID NO: 42582 - protein, 16 aa, Homo sapiens
CAKNRGTNWGSSLDYW

SEQ ID NO: 42583 - protein, 15 aa, Homo sapiens
CASEILTLTAYREYW

SEQ ID NO: 42584 - protein, 17 aa, Homo sapiens
CAKDISSIIVLSAFDMW

SEQ ID NO: 42585 - protein, 16 aa, Homo sapiens
CANIVVVTPNGPFDYW

SEQ ID NO: 42586 - protein, 20 aa, Homo sapiens
CARDQKYHNFWIGYSPFDFW

SEQ ID NO: 42587 - protein, 17 aa, Homo sapiens
CAHSRMAAAGTGYFDFW

SEQ ID NO: 42588 - protein, 21 aa, Homo sapiens
CARAGGEVFRYFDWLGYFDPW

SEQ ID NO: 42589 - protein, 15 aa, Homo sapiens
CATDVRRSVAQFDHW

SEQ ID NO: 42590 - protein, 22 aa, Homo sapiens
CARHSYCNGGTCSPGYNWFDPW

SEQ ID NO: 42591 - protein, 20 aa, Homo sapiens
CARDYEYYDFSIYSDSFDIW

SEQ ID NO: 42592 - protein, 19 aa, Homo sapiens
CAKPTYCSSTTCYYPFDQW

SEQ ID NO: 42593 - protein, 22 aa, Homo sapiens
CATEGPHSVADSPYDYYYMDVW

SEQ ID NO: 42594 - protein, 12 aa, Homo sapiens
CATNWHYEFSYW

SEQ ID NO: 42595 - protein, 13 aa, Homo sapiens
CVREGGQGYSLYW

SEQ ID NO: 42596 - protein, 19 aa, Homo sapiens
CARVGLWDSSDYYDVFDIW

SEQ ID NO: 42597 - protein, 17 aa, Homo sapiens
CARVTYYDGAHDAFDIW

SEQ ID NO: 42598 - protein, 18 aa, Homo sapiens
CARGRRITGATRNYFESW

SEQ ID NO: 42599 - protein, 17 aa, Homo sapiens
CARGGGVGTAMAYFDYW

SEQ ID NO: 42600 - protein, 13 aa, Homo sapiens
CTTKGYSGYDSYW

SEQ ID NO: 42601 - protein, 17 aa, Homo sapiens
CARDLAGDYGGYYFDYW

SEQ ID NO: 42602 - protein, 19 aa, Homo sapiens
CASQYSSRRHYYYYYMDVW

SEQ ID NO: 42603 - protein, 16 aa, Homo sapiens
CARTPSPYSSYYFDSW

SEQ ID NO: 42604 - protein, 16 aa, Homo sapiens
CAREQILVAAGKFDYW

SEQ ID NO: 42605 - protein, 13 aa, Homo sapiens
CAKGGPQWLVDYW

SEQ ID NO: 42606 - protein, 21 aa, Homo sapiens
CARDGEVYYDSSRGYYYCDYW

SEQ ID NO: 42607 - protein, 21 aa, Homo sapiens
CARLTKQWLVLPRGAYYFDYW

SEQ ID NO: 42608 - protein, 15 aa, Homo sapiens
CARDKAAGQNAFDVW

SEQ ID NO: 42609 - protein, 12 aa, Homo sapiens
CARESDWTFDFW

SEQ ID NO: 42610 - protein, 23 aa, Homo sapiens
CARVRDCNSGGTCYYSYYYMDVW

SEQ ID NO: 42611 - protein, 18 aa, Homo sapiens
CARDNWGVPVKYDAFDLW

SEQ ID NO: 42612 - protein, 18 aa, Homo sapiens
CARDRGNNFWRGYYPDYW

SEQ ID NO: 42613 - protein, 16 aa, Homo sapiens
CAKQYSGRRADAFDVW

SEQ ID NO: 42614 - protein, 17 aa, Homo sapiens
CAKDMASFRELRAFDYW

SEQ ID NO: 42615 - protein, 11 aa, Homo sapiens
CACGDDSFDIW

SEQ ID NO: 42616 - protein, 23 aa, Homo sapiens
CAHVRSYYAVLTGYYIGDYFDYW

SEQ ID NO: 42617 - protein, 21 aa, Homo sapiens
CVRGPHYFRGGAYYHPSFDSW

SEQ ID NO: 42618 - protein, 22 aa, Homo sapiens
CARRSPHDSENYYSPDDAFDIW

SEQ ID NO: 42619 - protein, 17 aa, Homo sapiens
CARDRDSSGPGDAFDIW

SEQ ID NO: 42620 - protein, 18 aa, Homo sapiens
CGKGSRGSGSFLSYFDYW

SEQ ID NO: 42621 - protein, 16 aa, Homo sapiens
CAKFYSGSSQQFFDYW

SEQ ID NO: 42622 - protein, 18 aa, Homo sapiens
CAREGGVAVADNDAFDLW

SEQ ID NO: 42623 - protein, 17 aa, Homo sapiens
CASEEVYGGNSEAFDIW

SEQ ID NO: 42624 - protein, 16 aa, Homo sapiens
CVHSQIMDGVTVFDYW

SEQ ID NO: 42625 - protein, 20 aa, Homo sapiens
CARESYGSGSYTIPGAFDIW

SEQ ID NO: 42626 - protein, 17 aa, Homo sapiens
CAREGITGEGVYFFDNW

SEQ ID NO: 42627 - protein, 18 aa, Homo sapiens
CAREMFLFGNYYRAYDIW

SEQ ID NO: 42628 - protein, 18 aa, Homo sapiens
CVREGRRPQPISYYFDYW

SEQ ID NO: 42629 - protein, 14 aa, Homo sapiens
CAREDSSGYNFEYW

SEQ ID NO: 42630 - protein, 21 aa, Homo sapiens
CVRDQNYYCGSTSCLSPFDFW

SEQ ID NO: 42631 - protein, 17 aa, Homo sapiens
CARDNGATILNWYLDLW

SEQ ID NO: 42632 - protein, 20 aa, Homo sapiens
CTRELGTEESPYYWYYMDVW

SEQ ID NO: 42633 - protein, 14 aa, Homo sapiens
CARSEFGEGVFDYW

SEQ ID NO: 42634 - protein, 16 aa, Homo sapiens
CARYDYNIYGGWVDPW

SEQ ID NO: 42635 - protein, 18 aa, Homo sapiens
CARDPYLARDYYFYMDVW

SEQ ID NO: 42636 - protein, 17 aa, Homo sapiens
CARRQLVLYQYYYMDVW

SEQ ID NO: 42637 - protein, 18 aa, Homo sapiens
CATGRRQWLSMGGSFDHW

SEQ ID NO: 42638 - protein, 18 aa, Homo sapiens
CARDLAAAGTGPFAFDIW

SEQ ID NO: 42639 - protein, 21 aa, Homo sapiens
CAREMYDNTGSYYGFPGLDYW

SEQ ID NO: 42640 - protein, 23 aa, Homo sapiens
CAKPFPNFYDSTDYYPNDAFDVW

SEQ ID NO: 42641 - protein, 15 aa, Homo sapiens
CQSADSTGSYPDVVF

SEQ ID NO: 42642 - protein, 13 aa, Homo sapiens
CAGGLLRYHFDYW

SEQ ID NO: 42643 - protein, 15 aa, Homo sapiens
CTTDPDQSDTHRDYW

SEQ ID NO: 42644 - protein, 12 aa, Homo sapiens
CQQYGKLPQISF

SEQ ID NO: 42645 - protein, 26 aa, Homo sapiens
CARGAGLMSYIVVAGTRGYYYYMDVW

SEQ ID NO: 42646 - protein, 15 aa, Homo sapiens
CVKDQEFTYGLFDYW

SEQ ID NO: 42647 - protein, 23 aa, Homo sapiens
CARRPAGPYCSSTGCYAPRFDPW

SEQ ID NO: 42648 - protein, 16 aa, Homo sapiens
CARVDLKTAASNFDYW

SEQ ID NO: 42649 - protein, 19 aa, Homo sapiens
CAKDGFCSGGSCYDYFDSW

SEQ ID NO: 42650 - protein, 14 aa, Homo sapiens
CARFNDILTGFDYW

SEQ ID NO: 42651 - protein, 18 aa, Homo sapiens
CARDFDATVAAGDAFEIW

SEQ ID NO: 42652 - protein, 20 aa, Homo sapiens
CARGLMYDHVWGSFRYYDSW

SEQ ID NO: 42653 - protein, 21 aa, Homo sapiens
CVRGGPTVSRRPALYLLFDIW

SEQ ID NO: 42654 - protein, 16 aa, Homo sapiens
CARVPGDWWNNWFDPW

SEQ ID NO: 42655 - protein, 19 aa, Homo sapiens
CARDPLRAVAGVLGWFDPW

SEQ ID NO: 42656 - protein, 19 aa, Homo sapiens
CATFYSGSGSYYVGAFDLW

SEQ ID NO: 42657 - protein, 17 aa, Homo sapiens
CARDLPSGSGSFQLDYW

SEQ ID NO: 42658 - protein, 19 aa, Homo sapiens
CAHTGSDYYDTSGTSFHYW

SEQ ID NO: 42659 - protein, 14 aa, Homo sapiens
CARETASYHAFDMW

SEQ ID NO: 42660 - protein, 17 aa, Homo sapiens
CVKAKFPWQHLSPFDYW

SEQ ID NO: 42661 - protein, 20 aa, Homo sapiens
CTRGGAVTASSLLQPRFQYW

SEQ ID NO: 42662 - protein, 21 aa, Homo sapiens
CAGPGRLYGSMTYYRGYFDYW

SEQ ID NO: 42663 - protein, 22 aa, Homo sapiens
CATRVRLYGGNSIGWYSYGDVW

SEQ ID NO: 42664 - protein, 20 aa, Homo sapiens
CARDPYYSFWSGSTTTHDYW

SEQ ID NO: 42665 - protein, 17 aa, Homo sapiens
CARGYFDWLLNDHFDYW

SEQ ID NO: 42666 - protein, 17 aa, Homo sapiens
CVKALAGLREVYIYDYW

SEQ ID NO: 42667 - protein, 25 aa, Homo sapiens
CVKDAYHYDSRGYYHGLSHYYMDVW

SEQ ID NO: 42668 - protein, 19 aa, Homo sapiens
CATDSDILTGYYTNAFAIW

SEQ ID NO: 42669 - protein, 19 aa, Homo sapiens
CAVFAPGYSSGRTDYFEYW

SEQ ID NO: 42670 - protein, 21 aa, Homo sapiens
CVKEAVAYWDDSVKRGYFDDW

SEQ ID NO: 42671 - protein, 17 aa, Homo sapiens
CARDVLGYDYVNWFDPW

SEQ ID NO: 42672 - protein, 26 aa, Homo sapiens
CAKDGVPMIRGMRSSLRFDTFYMDVW

SEQ ID NO: 42673 - protein, 21 aa, Homo sapiens
CASPQMNLIRGIVLPDAFDIW

SEQ ID NO: 42674 - protein, 19 aa, Homo sapiens
CAKDEGYTSGWYLGTFDYW

SEQ ID NO: 42675 - protein, 21 aa, Homo sapiens
CARVRGTSRLSNKADYYFENW

SEQ ID NO: 42676 - protein, 18 aa, Homo sapiens
CARAPGCSGGACFAFDIW

SEQ ID NO: 42677 - protein, 16 aa, Homo sapiens
CAKDNEATPMVVIDYW

SEQ ID NO: 42678 - protein, 16 aa, Homo sapiens
CARDKCNYGACHEDYW

SEQ ID NO: 42679 - protein, 22 aa, Homo sapiens
CAREVRYFDWRGSFYYYYMDVW

SEQ ID NO: 42680 - protein, 25 aa, Homo sapiens
CAKDPYYYDNSGFSSLDYYYYMDVW

SEQ ID NO: 42681 - protein, 16 aa, Homo sapiens
CARQVNDHSEFPPDYW

SEQ ID NO: 42682 - protein, 24 aa, Homo sapiens
CARHIYYDCSGYFRSWCYYYVDVW

SEQ ID NO: 42683 - protein, 14 aa, Homo sapiens
CAKYTHGSSGLDYW

SEQ ID NO: 42684 - protein, 21 aa, Homo sapiens
CARDELTTRPRTPGPGPFDLW

SEQ ID NO: 42685 - protein, 14 aa, Homo sapiens
CAPEDLGTNAFPVW

SEQ ID NO: 42686 - protein, 19 aa, Homo sapiens
CARERWYYSDGNTYSPDYW

SEQ ID NO: 42687 - protein, 22 aa, Homo sapiens
CAKEPYSPQYNGVGSYYRADYW

SEQ ID NO: 42688 - protein, 18 aa, Homo sapiens
CASDASGGNGGLGWFDPW

SEQ ID NO: 42689 - protein, 17 aa, Homo sapiens
CVRVNGPYYSAYPFDYW

SEQ ID NO: 42690 - protein, 19 aa, Homo sapiens
CARDMGQDLRYSYGYLDNW

SEQ ID NO: 42691 - protein, 21 aa, Homo sapiens
CARALQSYYYDSSGYPGFGYW

SEQ ID NO: 42692 - protein, 17 aa, Homo sapiens
CARDVWQWLPLFAFDIW

SEQ ID NO: 42693 - protein, 21 aa, Homo sapiens
CARVARKRTISAYREYYFDYW

SEQ ID NO: 42694 - protein, 14 aa, Homo sapiens
CTRGLNYVWWFDTW

SEQ ID NO: 42695 - protein, 15 aa, Homo sapiens
CARDRRGRDGYTDYW

SEQ ID NO: 42696 - protein, 16 aa, Homo sapiens
CATLFGDYAHDAFEIW

SEQ ID NO: 42697 - protein, 18 aa, Homo sapiens
CAKGQVGRHHYQSYMDAW

SEQ ID NO: 42698 - protein, 18 aa, Homo sapiens
CATIEYHYGTSGYYYDKW

SEQ ID NO: 42699 - protein, 25 aa, Homo sapiens
CQQYDSVPLTFGGGTKVEIKLCVTF

SEQ ID NO: 42700 - protein, 19 aa, Homo sapiens
CARERIAMVRGRIISFDPW

SEQ ID NO: 42701 - protein, 16 aa, Homo sapiens
CARESVLRGRSGHDYW

SEQ ID NO: 42702 - protein, 17 aa, Homo sapiens
CVKELRATAGLDAFDIW

SEQ ID NO: 42703 - protein, 17 aa, Homo sapiens
CARGDSIFGVIRRFDSW

SEQ ID NO: 42704 - protein, 15 aa, Homo sapiens
CARNGAYAHDVFDIW

SEQ ID NO: 42705 - protein, 14 aa, Homo sapiens
CAKSPDYSYGLDYW

SEQ ID NO: 42706 - protein, 22 aa, Homo sapiens
CARGTRLGHCTGTSCSGAFDLW

SEQ ID NO: 42707 - protein, 23 aa, Homo sapiens
CARVITVVRGVTKDYYNYYMDVW

SEQ ID NO: 42708 - protein, 13 aa, Homo sapiens
CATAIESNGFDVW

SEQ ID NO: 42709 - protein, 14 aa, Homo sapiens
CARLDSNGYYPDYW

SEQ ID NO: 42710 - protein, 17 aa, Homo sapiens
CARDRGRLVVITLFDNW

SEQ ID NO: 42711 - protein, 16 aa, Homo sapiens
CARGYCSSRSCYFDYW

SEQ ID NO: 42712 - protein, 19 aa, Homo sapiens
CAKDQMGGSGYHHDAFDIW

SEQ ID NO: 42713 - protein, 17 aa, Homo sapiens
CAKIGGPTSSYRYFDYW

SEQ ID NO: 42714 - protein, 14 aa, Homo sapiens
CAGQVTTTTAFDYW

SEQ ID NO: 42715 - protein, 22 aa, Homo sapiens
CARGRGVILLPALLTTSSFDYW

SEQ ID NO: 42716 - protein, 21 aa, Homo sapiens
CARLHIKLVRGVREGYCFDYW

SEQ ID NO: 42717 - protein, 16 aa, Homo sapiens
CVKDITIEGYASFDFW

SEQ ID NO: 42718 - protein, 26 aa, Homo sapiens
CARDHFNHVDGSGYLSAHYYYYMDVW

SEQ ID NO: 42719 - protein, 16 aa, Homo sapiens
CAKDISRTYYYYMDVW

SEQ ID NO: 42720 - protein, 16 aa, Homo sapiens
CATGPLGSNWYLFDFW

SEQ ID NO: 42721 - protein, 23 aa, Homo sapiens
CARKWGRDIVLPPAATGSAFDIW

SEQ ID NO: 42722 - protein, 25 aa, Homo sapiens
CARDDYDILTGYLGIYYYSYYMDVW

SEQ ID NO: 42723 - protein, 20 aa, Homo sapiens
CARVSPDPSTYYFYYYMDVW

SEQ ID NO: 42724 - protein, 21 aa, Homo sapiens
CAKDTSMTLIRGVTKHAFNIW

SEQ ID NO: 42725 - protein, 16 aa, Homo sapiens
CMTTVVTTSENTFDSW

SEQ ID NO: 42726 - protein, 17 aa, Homo sapiens
CARSKTSSWYLVYFDYW

SEQ ID NO: 42727 - protein, 20 aa, Homo sapiens
CARRWSPFSYSSNWRYSDLW

SEQ ID NO: 42728 - protein, 14 aa, Homo sapiens
CAKRPLYQYYMDVW

SEQ ID NO: 42729 - protein, 21 aa, Homo sapiens
CARPPSHYFDSSGTYSYFDFW

SEQ ID NO: 42730 - protein, 16 aa, Homo sapiens
CAKDRWGAVADPFDTW

SEQ ID NO: 42731 - protein, 18 aa, Homo sapiens
CAKLGVVEVAAATPFDPW

SEQ ID NO: 42732 - protein, 12 aa, Homo sapiens
CARLYWNSGDYW

SEQ ID NO: 42733 - protein, 21 aa, Homo sapiens
CARETYDLMTGYPRDNWFDPW

SEQ ID NO: 42734 - protein, 16 aa, Homo sapiens
CARGTPPSGDYPIDYW

SEQ ID NO: 42735 - protein, 19 aa, Homo sapiens
CARGYYDIAGSPRNAFDLW

SEQ ID NO: 42736 - protein, 15 aa, Homo sapiens
CARGETNGYPHFDDW

SEQ ID NO: 42737 - protein, 20 aa, Homo sapiens
CARVRVYRMGGYDSAFFDFW

SEQ ID NO: 42738 - protein, 18 aa, Homo sapiens
CATDPIVGPSRDWFFDFW

SEQ ID NO: 42739 - protein, 15 aa, Homo sapiens
CVINGRFGDSARDYW

SEQ ID NO: 42740 - protein, 24 aa, Homo sapiens
CTRSLVYCRSCSSGYFFYYYMDVW

SEQ ID NO: 42741 - protein, 20 aa, Homo sapiens
CARELSLYDSGGYKNWFDAW

SEQ ID NO: 42742 - protein, 19 aa, Homo sapiens
CARHRFLWLGELANWFDPW

SEQ ID NO: 42743 - protein, 17 aa, Homo sapiens
CTRARSSDSHHYYVDVW

SEQ ID NO: 42744 - protein, 16 aa, Homo sapiens
CARGQQQLVPGRFDPW

SEQ ID NO: 42745 - protein, 19 aa, Homo sapiens
CARRRSFSGYRKYYYMDVW

SEQ ID NO: 42746 - protein, 18 aa, Homo sapiens
CVTVKSAFYSGYVPFDYW

SEQ ID NO: 42747 - protein, 21 aa, Homo sapiens
CARSAPDSSDYYRGITAFDIW

SEQ ID NO: 42748 - protein, 20 aa, Homo sapiens
CARPGVYDSRGYFYPYFDNW

SEQ ID NO: 42749 - protein, 19 aa, Homo sapiens
CARDDSSSPPIYSYYMDAW

SEQ ID NO: 42750 - protein, 15 aa, Homo sapiens
CARDQWLVPSYLDYW

SEQ ID NO: 42751 - protein, 20 aa, Homo sapiens
CARDWTMGSGYAEFKWFDTW

SEQ ID NO: 42752 - protein, 23 aa, Homo sapiens
CARGQSSGSYSTFYYFSYYMDVW

SEQ ID NO: 42753 - protein, 20 aa, Homo sapiens
CARPPFEDGKNDYHYYLDVW

SEQ ID NO: 42754 - protein, 19 aa, Homo sapiens
CARQVDYNIGWHPAYMDVW

SEQ ID NO: 42755 - protein, 13 aa, Homo sapiens
CSGGSCFASFDYW

SEQ ID NO: 42756 - protein, 14 aa, Homo sapiens
CARHVDWDYYFDSW

SEQ ID NO: 42757 - protein, 18 aa, Homo sapiens
CTKEAASGNHYNPRFDSW

SEQ ID NO: 42758 - protein, 19 aa, Homo sapiens
CARDLSSYVYDNKKVPDYW

SEQ ID NO: 42759 - protein, 15 aa, Homo sapiens
CARVYGDHEPSFDNW

SEQ ID NO: 42760 - protein, 18 aa, Homo sapiens
CAKRLMIAVVTTIYMDVW

SEQ ID NO: 42761 - protein, 16 aa, Homo sapiens
CARTYFGDAVYYHDYW

SEQ ID NO: 42762 - protein, 21 aa, Homo sapiens
CARGHTTGGYSGYDSGAFDMW

SEQ ID NO: 42763 - protein, 14 aa, Homo sapiens
CATFRGGDDAFDIW

SEQ ID NO: 42764 - protein, 18 aa, Homo sapiens
CAHQIQPQFWSGYHFDSW

SEQ ID NO: 42765 - protein, 19 aa, Homo sapiens
CARLESSDYYAPLYYFDYW

SEQ ID NO: 42766 - protein, 16 aa, Homo sapiens
CARPHVAELVDAFDIW

SEQ ID NO: 42767 - protein, 17 aa, Homo sapiens
CANLNGDSGGPYYFHFW

SEQ ID NO: 42768 - protein, 17 aa, Homo sapiens
CAKGYYDATSHLAFDIW

SEQ ID NO: 42769 - protein, 17 aa, Homo sapiens
CATAGSSWRPHYYMDVW

SEQ ID NO: 42770 - protein, 20 aa, Homo sapiens
CAAVQGPMFRGVISYVFDHW

SEQ ID NO: 42771 - protein, 11 aa, Homo sapiens
CSRPGLNFDLW

SEQ ID NO: 42772 - protein, 17 aa, Homo sapiens
CARDSTYYDTSDAFDLW

SEQ ID NO: 42773 - protein, 21 aa, Homo sapiens
CARYAMRDFDLFYSYDAFDIW

SEQ ID NO: 42774 - protein, 17 aa, Homo sapiens
CAKDVRPGGGYEPFDYW

SEQ ID NO: 42775 - protein, 16 aa, Homo sapiens
CAREDVRSWYSWFDPW

SEQ ID NO: 42776 - protein, 16 aa, Homo sapiens
CARDTDGDYIILFDYW

SEQ ID NO: 42777 - protein, 21 aa, Homo sapiens
CARGPDTVVVPAAVGRWFDPW

SEQ ID NO: 42778 - protein, 15 aa, Homo sapiens
CVRDQNRLSPWFDPW

SEQ ID NO: 42779 - protein, 19 aa, Homo sapiens
CAKGNQDGRRSRGWYIDFW

SEQ ID NO: 42780 - protein, 16 aa, Homo sapiens
CARALTGWREYYMDVW

SEQ ID NO: 42781 - protein, 15 aa, Homo sapiens
CARDPEIVAGRFDLW

SEQ ID NO: 42782 - protein, 14 aa, Homo sapiens
CARTSSGLDGLDIW

SEQ ID NO: 42783 - protein, 18 aa, Homo sapiens
CAREALWRASLYNWFDPW

SEQ ID NO: 42784 - protein, 14 aa, Homo sapiens
CAKWAYELLTFDCW

SEQ ID NO: 42785 - protein, 15 aa, Homo sapiens
CNSRDSGGYHLNVIF

SEQ ID NO: 42786 - protein, 16 aa, Homo sapiens
CVKDTCGDDCSEFDKW

SEQ ID NO: 42787 - protein, 19 aa, Homo sapiens
CAHVRLYGSGSYYDPFDYW

SEQ ID NO: 42788 - protein, 17 aa, Homo sapiens
CAKGKSLVYDSSVFDYW

SEQ ID NO: 42789 - protein, 19 aa, Homo sapiens
CARDLGGLYSSTWYIFDYW

SEQ ID NO: 42790 - protein, 19 aa, Homo sapiens
CAKSAMIRGQAGDGGFDIW

SEQ ID NO: 42791 - protein, 23 aa, Homo sapiens
CARGSIRVCTINSCQPLDAFDMW

SEQ ID NO: 42792 - protein, 22 aa, Homo sapiens
CARERPYYYDSSGYYRGWFDPW

SEQ ID NO: 42793 - protein, 13 aa, Homo sapiens
CQSSDSIGTSVMF

SEQ ID NO: 42794 - protein, 29 aa, Homo sapiens
CARGPIPSDLLLSAVRHGQTNSYHYMDVW

SEQ ID NO: 42795 - protein, 21 aa, Homo sapiens
CAKAEPYNSGTFTGDSWFDPW

SEQ ID NO: 42796 - protein, 16 aa, Homo sapiens
CARALRVGYTNRPDYW

SEQ ID NO: 42797 - protein, 20 aa, Homo sapiens
CARASMMMFRGDIPAWFDPW

SEQ ID NO: 42798 - protein, 22 aa, Homo sapiens
CAKVFHAYCSGGNCYSGPFDIW

SEQ ID NO: 42799 - protein, 17 aa, Homo sapiens
CAKDIDIRAKPFYFDSW

SEQ ID NO: 42800 - protein, 15 aa, Homo sapiens
CARAMIVVVHAFDIW

SEQ ID NO: 42801 - protein, 22 aa, Homo sapiens
CAREVGSYSSGWYKGARPFDYW

SEQ ID NO: 42802 - protein, 19 aa, Homo sapiens
CARANYGSGSYYLYHFDYW

SEQ ID NO: 42803 - protein, 18 aa, Homo sapiens
CARQLIFQAAPGDDFDIW

SEQ ID NO: 42804 - protein, 23 aa, Homo sapiens
CARGWRYFDSSGYSILGAPSDYW

SEQ ID NO: 42805 - protein, 20 aa, Homo sapiens
CARSQNYYDSSGIPYYFDYW

SEQ ID NO: 42806 - protein, 19 aa, Homo sapiens
CAHKGPSLGASPADAFDIW

SEQ ID NO: 42807 - protein, 15 aa, Homo sapiens
CVVTTYSGPNWFDPW

SEQ ID NO: 42808 - protein, 20 aa, Homo sapiens
CAKATSGYYDILTGYVGDYW

SEQ ID NO: 42809 - protein, 12 aa, Homo sapiens
CATYSSGWIDYW

SEQ ID NO: 42810 - protein, 16 aa, Homo sapiens
CTRQLDGTSAQYYGYW

SEQ ID NO: 42811 - protein, 16 aa, Homo sapiens
CATGVAAINEDWFDPW

SEQ ID NO: 42812 - protein, 19 aa, Homo sapiens
CAREKAGSGSYSSDAFDMW

SEQ ID NO: 42813 - protein, 22 aa, Homo sapiens
CARDYGLNIIVVDLHEGYFDLW

SEQ ID NO: 42814 - protein, 19 aa, Homo sapiens
CARHTSSTYFYDGNWFDRW

SEQ ID NO: 42815 - protein, 16 aa, Homo sapiens
CARSGYGPNYWYFDLW

SEQ ID NO: 42816 - protein, 18 aa, Homo sapiens
CARESGCGGDCKRAFDIW

SEQ ID NO: 42817 - protein, 18 aa, Homo sapiens
CAKDVRGGYSYVYYFDYW

SEQ ID NO: 42818 - protein, 16 aa, Homo sapiens
CARDLVTYDVLGFDPW

SEQ ID NO: 42819 - protein, 18 aa, Homo sapiens
CARGNYYHDYPENWYDPW

SEQ ID NO: 42820 - protein, 17 aa, Homo sapiens
CARGRDDYGDYYGFDYW

SEQ ID NO: 42821 - protein, 22 aa, Homo sapiens
CAKDVSDYYGSGTYYGGYFDSW

SEQ ID NO: 42822 - protein, 20 aa, Homo sapiens
CAKDITYYDSRGYYYYMDVW

SEQ ID NO: 42823 - protein, 18 aa, Homo sapiens
CVKDGPGIAVVNGTFDMW

SEQ ID NO: 42824 - protein, 15 aa, Homo sapiens
CARHVEGPLRQIDYW

SEQ ID NO: 42825 - protein, 15 aa, Homo sapiens
CARDRSSSLDCFDSW

SEQ ID NO: 42826 - protein, 17 aa, Homo sapiens
CARDDSYDSNGYYLDYW

SEQ ID NO: 42827 - protein, 21 aa, Homo sapiens
CARLHSGSMIGNYFFYYMDVW

SEQ ID NO: 42828 - protein, 20 aa, Homo sapiens
CARAPNSQVVSFREYYMDVW

SEQ ID NO: 42829 - protein, 18 aa, Homo sapiens
CARLRDGYTSGWTDFDYW

SEQ ID NO: 42830 - protein, 19 aa, Homo sapiens
CARDGRDLADGNNDPDDYW

SEQ ID NO: 42831 - protein, 14 aa, Homo sapiens
CVGYSHVLDSFDIW

SEQ ID NO: 42832 - protein, 15 aa, Homo sapiens
CARVDEFLEWTLDYW

SEQ ID NO: 42833 - protein, 14 aa, Homo sapiens
CARGGNFPFYHDYW

SEQ ID NO: 42834 - protein, 14 aa, Homo sapiens
CATVLMWEVTNDYW

SEQ ID NO: 42835 - protein, 15 aa, Homo sapiens
CARGVWSDYYQLDYW

SEQ ID NO: 42836 - protein, 18 aa, Homo sapiens
CARERGPIAVAGTAFDHW

SEQ ID NO: 42837 - protein, 17 aa, Homo sapiens
CARALAYNYPHDSFDIW

SEQ ID NO: 42838 - protein, 15 aa, Homo sapiens
CASWTSLFPLQPDYW

SEQ ID NO: 42839 - protein, 11 aa, Homo sapiens
CARYKKEGDYW

SEQ ID NO: 42840 - protein, 20 aa, Homo sapiens
CARLTTVTKTYYYYHYMDVW

SEQ ID NO: 42841 - protein, 17 aa, Homo sapiens
CAKDIYVVVGGTHFDSW

SEQ ID NO: 42842 - protein, 16 aa, Homo sapiens
CAKGIALGDLAPFDYW

SEQ ID NO: 42843 - protein, 16 aa, Homo sapiens
CAKDRHSNSWYYLDTW

SEQ ID NO: 42844 - protein, 14 aa, Homo sapiens
CALISRQLPPVDYW

SEQ ID NO: 42845 - protein, 25 aa, Homo sapiens
CARDISYYDILTGYAGPTTNWFDSW

SEQ ID NO: 42846 - protein, 19 aa, Homo sapiens
CARACLRVVVPAGDAFDIW

SEQ ID NO: 42847 - protein, 17 aa, Homo sapiens
CAKAERLYSGSYFFDSW

SEQ ID NO: 42848 - protein, 20 aa, Homo sapiens
CARVIPAWGSYRRYYYFDYW

SEQ ID NO: 42849 - protein, 22 aa, Homo sapiens
CATTLLLAAEYRQPATDYFDYW

SEQ ID NO: 42850 - protein, 20 aa, Homo sapiens
CVRQGGIIRHPATMRWFDPW

SEQ ID NO: 42851 - protein, 13 aa, Homo sapiens
CVKESDDLLQDYW

SEQ ID NO: 42852 - protein, 19 aa, Homo sapiens
CATGLRDWQQLVIDAFDMW

SEQ ID NO: 42853 - protein, 21 aa, Homo sapiens
CARHTVTMVREYRVSGAFDIW

SEQ ID NO: 42854 - protein, 21 aa, Homo sapiens
CARDEPYNGARTPGPGPFDSW

SEQ ID NO: 42855 - protein, 20 aa, Homo sapiens
CARVKRGRWLQPTELLFDYW

SEQ ID NO: 42856 - protein, 16 aa, Homo sapiens
CARIATTIIYYYMDVW

SEQ ID NO: 42857 - protein, 13 aa, Homo sapiens
CARRSYQLVFDYW

SEQ ID NO: 42858 - protein, 23 aa, Homo sapiens
CSRDGRRTYYDTLTGNEDAFDIW

SEQ ID NO: 42859 - protein, 15 aa, Homo sapiens
CASSLTTVTFWFDPW

SEQ ID NO: 42860 - protein, 15 aa, Homo sapiens
CAKSNGEYNNWFDPW

SEQ ID NO: 42861 - protein, 19 aa, Homo sapiens
CAREGGAQMAAITYYLDVW

SEQ ID NO: 42862 - protein, 18 aa, Homo sapiens
CALFPGLGRTFIDWLDPW

SEQ ID NO: 42863 - protein, 24 aa, Homo sapiens
CASLGPYYYDSSGHRVGSGAFDIW

SEQ ID NO: 42864 - protein, 16 aa, Homo sapiens
CARRVRGQLGPHFDYW

SEQ ID NO: 42865 - protein, 14 aa, Homo sapiens
CANWGPGTYSADYW

SEQ ID NO: 42866 - protein, 15 aa, Homo sapiens
CAREGGKDLKALDVW

SEQ ID NO: 42867 - protein, 18 aa, Homo sapiens
CARARHGSGSYFDAFDMW

SEQ ID NO: 42868 - protein, 12 aa, Homo sapiens
CQKYHNAPALTF

SEQ ID NO: 42869 - protein, 17 aa, Homo sapiens
CARGILWFGDEAYFDYW

SEQ ID NO: 42870 - protein, 20 aa, Homo sapiens
CARHTVVVVSSDTQNYFGPW

SEQ ID NO: 42871 - protein, 19 aa, Homo sapiens
CAKMTGNRLWFGDFAFDCW

SEQ ID NO: 42872 - protein, 18 aa, Homo sapiens
CAKVLSYNWHYPYYFDSW

SEQ ID NO: 42873 - protein, 19 aa, Homo sapiens
CARGHSYNIDGTGGGFDLW

SEQ ID NO: 42874 - protein, 21 aa, Homo sapiens
CAKTSGASAGTRVRYWYFDLW

SEQ ID NO: 42875 - protein, 20 aa, Homo sapiens
CARVPSCSGPDCYIWYFDLW

SEQ ID NO: 42876 - protein, 18 aa, Homo sapiens
CGRDPIAVAGHREGIDYW

SEQ ID NO: 42877 - protein, 22 aa, Homo sapiens
CVRHERYITGSGVIIKDAFDIW

SEQ ID NO: 42878 - protein, 26 aa, Homo sapiens
CARNHGEKPFSTMLGIKGTVEDFDNW

SEQ ID NO: 42879 - protein, 18 aa, Homo sapiens
CTTDPYCSDIGCYWFAPW

SEQ ID NO: 42880 - protein, 13 aa, Homo sapiens
CARDGYISYGDHW

SEQ ID NO: 42881 - protein, 19 aa, Homo sapiens
CAKGGSGGYSYGYNWFDPW

SEQ ID NO: 42882 - protein, 17 aa, Homo sapiens
CAHRRGSESTGGIFDFW

SEQ ID NO: 42883 - protein, 16 aa, Homo sapiens
CARTEAAAAGFRLDYW

SEQ ID NO: 42884 - protein, 23 aa, Homo sapiens
CTTDGHYDISTGSYMVVDYFDYW

SEQ ID NO: 42885 - protein, 17 aa, Homo sapiens
CAKDIGPIAVSGDFDYW

SEQ ID NO: 42886 - protein, 24 aa, Homo sapiens
CLRAEDTALYYCVKDLLHWGPDYW

SEQ ID NO: 42887 - protein, 22 aa, Homo sapiens
CASALAGYGSAWDAYYYYMDVW

SEQ ID NO: 42888 - protein, 21 aa, Homo sapiens
CARRGPRYFDWLLHDNWFDPW

SEQ ID NO: 42889 - protein, 21 aa, Homo sapiens
CVRLPQGRVTLDYYNYYMDVW

SEQ ID NO: 42890 - protein, 20 aa, Homo sapiens
CTRLSGAAYGSPRMGWLDPW

SEQ ID NO: 42891 - protein, 16 aa, Homo sapiens
CARDPKRGDGYAFDNW

SEQ ID NO: 42892 - protein, 14 aa, Homo sapiens
CAREYGSGSYADHW

SEQ ID NO: 42893 - protein, 18 aa, Homo sapiens
CAKDHGPTGDYVNWFDSW

SEQ ID NO: 42894 - protein, 15 aa, Homo sapiens
CARRPFIAVGGFDYW

SEQ ID NO: 42895 - protein, 24 aa, Homo sapiens
CARHVGPGRLPMGEPSTSDASDIW

SEQ ID NO: 42896 - protein, 15 aa, Homo sapiens
CARSSYYFGPPSDYW

SEQ ID NO: 42897 - protein, 14 aa, Homo sapiens
CAKGPLWFGEPDYW

SEQ ID NO: 42898 - protein, 20 aa, Homo sapiens
CARAPKGSLVSFREYYFDYW

SEQ ID NO: 42899 - protein, 21 aa, Homo sapiens
CASPSRPYYFGSGNYSAFDSW

SEQ ID NO: 42900 - protein, 16 aa, Homo sapiens
CARRIFGSGVRAFDIW

SEQ ID NO: 42901 - protein, 28 aa, Homo sapiens
CARAAYPPGYKFWSGYLSPYSYYYMDVW

SEQ ID NO: 42902 - protein, 17 aa, Homo sapiens
CATHPMDHEGSRYIDFW

SEQ ID NO: 42903 - protein, 18 aa, Homo sapiens
CARAGSGSFYRASHFDHW

SEQ ID NO: 42904 - protein, 24 aa, Homo sapiens
CARHPDSRGYSYGPDWGSHLFDYW

SEQ ID NO: 42905 - protein, 20 aa, Homo sapiens
CARTYYDILTGSTDITFDYW

SEQ ID NO: 42906 - protein, 19 aa, Homo sapiens
CARDFESGIITPSYSPDYW

SEQ ID NO: 42907 - protein, 17 aa, Homo sapiens
CVKVHTAQSFGRHFDYW

SEQ ID NO: 42908 - protein, 20 aa, Homo sapiens
CARDLYESHVAATVLWFDPW

SEQ ID NO: 42909 - protein, 21 aa, Homo sapiens
CAKDQERGYSYGYRDAPLDYW

SEQ ID NO: 42910 - protein, 19 aa, Homo sapiens
CAREPDSPKTVTTGYFDYW

SEQ ID NO: 42911 - protein, 18 aa, Homo sapiens
CTRVAAAAAYYYYYMDVW

SEQ ID NO: 42912 - protein, 15 aa, Homo sapiens
CAALVRGIIPTIDYW

SEQ ID NO: 42913 - protein, 16 aa, Homo sapiens
CARDATLVPPPFFDYW

SEQ ID NO: 42914 - protein, 16 aa, Homo sapiens
CARHEQSAYYSGFVYW

SEQ ID NO: 42915 - protein, 14 aa, Homo sapiens
CARYLGTYYGFDYW

SEQ ID NO: 42916 - protein, 18 aa, Homo sapiens
CARKMVDYDSGTWYLDSW

SEQ ID NO: 42917 - protein, 20 aa, Homo sapiens
CVGDQTYYSTGSGYFQGDYW

SEQ ID NO: 42918 - protein, 16 aa, Homo sapiens
CAKPRGGNYHDAFDIW

SEQ ID NO: 42919 - protein, 17 aa, Homo sapiens
CATVEDDYGDYRTFDYW

SEQ ID NO: 42920 - protein, 21 aa, Homo sapiens
CVRPVRFYDTSGYWRYYFDQW

SEQ ID NO: 42921 - protein, 14 aa, Homo sapiens
CAGSRWVRQGFEYW

SEQ ID NO: 42922 - protein, 23 aa, Homo sapiens
CARGGYCGGECNTYYYYYFMDVW

SEQ ID NO: 42923 - protein, 22 aa, Homo sapiens
CARAKTRFYTPGSYHYYYMDVW

SEQ ID NO: 42924 - protein, 16 aa, Homo sapiens
CAKDARWLSYDSFDIW

SEQ ID NO: 42925 - protein, 20 aa, Homo sapiens
CARDSGITMIIVVRSDFDSW

SEQ ID NO: 42926 - protein, 24 aa, Homo sapiens
CARDREYTVSGRSWSWYYFYMDVW

SEQ ID NO: 42927 - protein, 16 aa, Homo sapiens
CARAFFEGPYYYMDVW

SEQ ID NO: 42928 - protein, 24 aa, Homo sapiens
CARSYYYDSSGYYQKYYYYYMDVW

SEQ ID NO: 42929 - protein, 16 aa, Homo sapiens
CARGNSGSYLAGFAYW

SEQ ID NO: 42930 - protein, 19 aa, Homo sapiens
CAKDGQWEVNYYDFYMDVW

SEQ ID NO: 42931 - protein, 17 aa, Homo sapiens
CAKEVTLLVMVNPLDYW

SEQ ID NO: 42932 - protein, 17 aa, Homo sapiens
CARGGDETSGYYVFDYW

SEQ ID NO: 42933 - protein, 21 aa, Homo sapiens
CARAPPTVTFLYFYYYYLDVW

SEQ ID NO: 42934 - protein, 21 aa, Homo sapiens
CARVMSYYSDTSGFLRWFDPW

SEQ ID NO: 42935 - protein, 24 aa, Homo sapiens
CTRHDFYFYATGGYQRAQNAFDIW

SEQ ID NO: 42936 - protein, 16 aa, Homo sapiens
CARNGGGSGWYRLDYW

SEQ ID NO: 42937 - protein, 20 aa, Homo sapiens
CARHAFYCSGSSCLHYFDYW

SEQ ID NO: 42938 - protein, 17 aa, Homo sapiens
CARPINSGYRDDAFDIW

SEQ ID NO: 42939 - protein, 19 aa, Homo sapiens
CARDPDTAMVLYYYYMDLW

SEQ ID NO: 42940 - protein, 18 aa, Homo sapiens
CVRGRAWYDSSWHAFDVW

SEQ ID NO: 42941 - protein, 16 aa, Homo sapiens
CARQGGRPEASYFDHW

SEQ ID NO: 42942 - protein, 22 aa, Homo sapiens
CAKGVYGSGSYYNGVPDYFDYW

SEQ ID NO: 42943 - protein, 19 aa, Homo sapiens
CTTFFHYGSGSYYIGFDYW

SEQ ID NO: 42944 - protein, 19 aa, Homo sapiens
CVRGGPVVVVQPPDKYFYW

SEQ ID NO: 42945 - protein, 20 aa, Homo sapiens
CAKALRPGLQLEHGYYFDYW

SEQ ID NO: 42946 - protein, 17 aa, Homo sapiens
CTKDFRPHASAFNSDYW

SEQ ID NO: 42947 - protein, 28 aa, Homo sapiens
CARLLPSSYYYNSSADYWGYYYYYMDVW

SEQ ID NO: 42948 - protein, 19 aa, Homo sapiens
CAKSHCGPDCYPQDWFDPW

SEQ ID NO: 42949 - protein, 19 aa, Homo sapiens
CARGWNYFDTRGARYFDFW

SEQ ID NO: 42950 - protein, 17 aa, Homo sapiens
CARSSGILTGDWYFDLW

SEQ ID NO: 42951 - protein, 19 aa, Homo sapiens
CAKGVNAVVPPAIAAFDFW

SEQ ID NO: 42952 - protein, 22 aa, Homo sapiens
CARDYNDILTRYSTASYYFGSW

SEQ ID NO: 42953 - protein, 18 aa, Homo sapiens
CASLLRSSYYYEMFFDYW

SEQ ID NO: 42954 - protein, 23 aa, Homo sapiens
CARAILYCGNPNCPWGPYYFDSW

SEQ ID NO: 42955 - protein, 16 aa, Homo sapiens
CARNYGTNPFDAFDLW

SEQ ID NO: 42956 - protein, 15 aa, Homo sapiens
CATDDAGTTSAFDYW

SEQ ID NO: 42957 - protein, 16 aa, Homo sapiens
CAKDIDPGEGDAFDIW

SEQ ID NO: 42958 - protein, 18 aa, Homo sapiens
CASQPYCGGDCYSVFDIW

SEQ ID NO: 42959 - protein, 19 aa, Homo sapiens
CAKTLYASTSYRPSHVDYW

SEQ ID NO: 42960 - protein, 15 aa, Homo sapiens
CARGDWLRDYYMDVW

SEQ ID NO: 42961 - protein, 22 aa, Homo sapiens
CSREDLYDASGYALGGDGFDVW

SEQ ID NO: 42962 - protein, 16 aa, Homo sapiens
CARGGDRNGHKNFDYW

SEQ ID NO: 42963 - protein, 17 aa, Homo sapiens
CARIGKPQTFYFYMDVW

SEQ ID NO: 42964 - protein, 17 aa, Homo sapiens
CVKDMSLRWLDYYFDYW

SEQ ID NO: 42965 - protein, 12 aa, Homo sapiens
CASGGSYSFDYW

SEQ ID NO: 42966 - protein, 10 aa, Homo sapiens
CASFREFDIW

SEQ ID NO: 42967 - protein, 18 aa, Homo sapiens
CAKTWLGFGELPYYFDYW

SEQ ID NO: 42968 - protein, 22 aa, Homo sapiens
CARAGYCTAGSCSSGLGAFDIW

SEQ ID NO: 42969 - protein, 18 aa, Homo sapiens
CAHSPNLYYDFLTPFDNW

SEQ ID NO: 42970 - protein, 17 aa, Homo sapiens
CARDNPLYPGGSGNDYW

SEQ ID NO: 42971 - protein, 20 aa, Homo sapiens
CAKEGLPYTSSSKRGYMDVW

SEQ ID NO: 42972 - protein, 19 aa, Homo sapiens
CAKREFRWEPDPNDAFDIW

SEQ ID NO: 42973 - protein, 22 aa, Homo sapiens
CARVLPDHYDSSGYHDTYFDQW

SEQ ID NO: 42974 - protein, 18 aa, Homo sapiens
CARDSAAYSSGDHPFDLW

SEQ ID NO: 42975 - protein, 14 aa, Homo sapiens
CVLYMGSGVSNWVF

SEQ ID NO: 42976 - protein, 23 aa, Homo sapiens
CARHLALHYSDSSSYSLKTFDLW

SEQ ID NO: 42977 - protein, 21 aa, Homo sapiens
CARGFLAGHSRGRIPTSFDYW

SEQ ID NO: 42978 - protein, 20 aa, Homo sapiens
CARLRRRCSGGNCYGYFDYW

SEQ ID NO: 42979 - protein, 18 aa, Homo sapiens
CSRAAYSYAAGTYYSDSW

SEQ ID NO: 42980 - protein, 17 aa, Homo sapiens
CAKVIHSGSFPEAFDVW

SEQ ID NO: 42981 - protein, 17 aa, Homo sapiens
CTRYCSTPSCYGAFDIW

SEQ ID NO: 42982 - protein, 21 aa, Homo sapiens
CARENTDYSNSYYYYYYMDVW

SEQ ID NO: 42983 - protein, 19 aa, Homo sapiens
CARGGGNYDWTKAYFFDYW

SEQ ID NO: 42984 - protein, 23 aa, Homo sapiens
CAREYGAVRFFDWSQRTEGFDIW

SEQ ID NO: 42985 - protein, 18 aa, Homo sapiens
CAKDLSSFRELLLLPDYW

SEQ ID NO: 42986 - protein, 17 aa, Homo sapiens
CARDHSSSGPSWYFDLW

SEQ ID NO: 42987 - protein, 27 aa, Homo sapiens
CASPASPTDAYCSSTSCYIGDWYFDLW

SEQ ID NO: 42988 - protein, 22 aa, Homo sapiens
CARDPLPSCSGGICYSNYLDYW

SEQ ID NO: 42989 - protein, 21 aa, Homo sapiens
CARGGWSKTGTTVPQGYMDVW

SEQ ID NO: 42990 - protein, 18 aa, Homo sapiens
CAKPSGTKRVATDAFDIW

SEQ ID NO: 42991 - protein, 18 aa, Homo sapiens
CARDGSSGSRGDPNFDYW

SEQ ID NO: 42992 - protein, 13 aa, Homo sapiens
CQSADYSGTFPLF

SEQ ID NO: 42993 - protein, 20 aa, Homo sapiens
CARDPQGYYYGLGQYYFDYW

SEQ ID NO: 42994 - protein, 15 aa, Homo sapiens
CARRGPMTYDALDMW

SEQ ID NO: 42995 - protein, 26 aa, Homo sapiens
CAGDRHELDSSGYFSHNYYYYYMDVW

SEQ ID NO: 42996 - protein, 16 aa, Homo sapiens
CARGGGAGRPIWFDPW

SEQ ID NO: 42997 - protein, 20 aa, Homo sapiens
CAKTWDTSGWYRGWDYFDNW

SEQ ID NO: 42998 - protein, 24 aa, Homo sapiens
CARGGDYDYVWGSYRAHREWFDPW

SEQ ID NO: 42999 - protein, 19 aa, Homo sapiens
CAKDNGHCSVTTGCVNDYW

SEQ ID NO: 43000 - protein, 14 aa, Homo sapiens
CSTAVTSRSSIDYW

SEQ ID NO: 43001 - protein, 26 aa, Homo sapiens
CVKDAGVSGGDLYDIVTGYDYYFDAW

SEQ ID NO: 43002 - protein, 19 aa, Homo sapiens
CARDLIMIRGILIKWFDPW

SEQ ID NO: 43003 - protein, 19 aa, Homo sapiens
CARDPGGRSGARYNYFDYW

SEQ ID NO: 43004 - protein, 19 aa, Homo sapiens
CAKDRGFCTNGVCYFSDYW

SEQ ID NO: 43005 - protein, 20 aa, Homo sapiens
CARRALYGLGSFYNLPGDYW

SEQ ID NO: 43006 - protein, 18 aa, Homo sapiens
CARSPGRNMVNVYYFDYW

SEQ ID NO: 43007 - protein, 14 aa, Homo sapiens
CAKDLYDTYAFDMW

SEQ ID NO: 43008 - protein, 18 aa, Homo sapiens
CARRSGLLWSAEGWFDPW

SEQ ID NO: 43009 - protein, 24 aa, Homo sapiens
CARDPWNYDIFSGSLEGNFYFDFW

SEQ ID NO: 43010 - protein, 20 aa, Homo sapiens
CARHPVSLWGTGYYYYMDVW

SEQ ID NO: 43011 - protein, 21 aa, Homo sapiens
CATGYCGGGGCDDRSRFFAYW

SEQ ID NO: 43012 - protein, 15 aa, Homo sapiens
CARHGVEFEFHFDSW

SEQ ID NO: 43013 - protein, 20 aa, Homo sapiens
CARHRGVIGGYNGYDLIDYW

SEQ ID NO: 43014 - protein, 24 aa, Homo sapiens
CVRHGSFSVSYDILTGYYYYFEYW

SEQ ID NO: 43015 - protein, 17 aa, Homo sapiens
CARILGSVAAPRPFDYW

SEQ ID NO: 43016 - protein, 26 aa, Homo sapiens
CAKDASGAGYCSGGRCWPYPGWFGPW

SEQ ID NO: 43017 - protein, 17 aa, Homo sapiens
CARDRYGGNSNDAFDIW

SEQ ID NO: 43018 - protein, 18 aa, Homo sapiens
CAHSRHVITMLRAPFDFW

SEQ ID NO: 43019 - protein, 18 aa, Homo sapiens
CATTYYNNGVSYKSFDPW

SEQ ID NO: 43020 - protein, 19 aa, Homo sapiens
CAKSRGVAGYYPNYYMDVW

SEQ ID NO: 43021 - protein, 19 aa, Homo sapiens
CATTLYNWNDQQSGAFDIW

SEQ ID NO: 43022 - protein, 23 aa, Homo sapiens
CATSATGLQIDPYGGHPWQFDTW

SEQ ID NO: 43023 - protein, 20 aa, Homo sapiens
CSRSPLHYSDSSDLYYFDYW

SEQ ID NO: 43024 - protein, 15 aa, Homo sapiens
CARRRNIFGPDFDYW

SEQ ID NO: 43025 - protein, 23 aa, Homo sapiens
CARGDQQWLAALKYNYYYYMDVW

SEQ ID NO: 43026 - protein, 22 aa, Homo sapiens
CAHRRGTRDSGSIYFYYYMDVW

SEQ ID NO: 43027 - protein, 16 aa, Homo sapiens
CARGGTYSRDHYFDYW

SEQ ID NO: 43028 - protein, 15 aa, Homo sapiens
CARGVLGRADSFDIW

SEQ ID NO: 43029 - protein, 15 aa, Homo sapiens
CAKGYYLSPDTFDVW

SEQ ID NO: 43030 - protein, 16 aa, Homo sapiens
CAINSYRSSWYYFDYW

SEQ ID NO: 43031 - protein, 14 aa, Homo sapiens
CAKTVLTTNSIDYW

SEQ ID NO: 43032 - protein, 16 aa, Homo sapiens
CAAVLRGMGGYYFEYW

SEQ ID NO: 43033 - protein, 17 aa, Homo sapiens
CAKGWDYYDSRHDIDYW

SEQ ID NO: 43034 - protein, 22 aa, Homo sapiens
CAKERAAVLRYFDWLFYDFDYW

SEQ ID NO: 43035 - protein, 22 aa, Homo sapiens
CARHGQRRLPIATQPPSWFDPW

SEQ ID NO: 43036 - protein, 19 aa, Homo sapiens
CATDNASGRQNNIFPFDLW

SEQ ID NO: 43037 - protein, 22 aa, Homo sapiens
CARDSDYDILTGYYKEAWFDPW

SEQ ID NO: 43038 - protein, 22 aa, Homo sapiens
CAHKAYYAVLTGYSKYNWFAPW

SEQ ID NO: 43039 - protein, 16 aa, Homo sapiens
CARAGLRLPNNWFDPW

SEQ ID NO: 43040 - protein, 19 aa, Homo sapiens
CARHASSMRGLIISPFDHW

SEQ ID NO: 43041 - protein, 19 aa, Homo sapiens
CARYINQAAVAADTPFDFW

SEQ ID NO: 43042 - protein, 17 aa, Homo sapiens
CARGKWFGELLLAFDYW

SEQ ID NO: 43043 - protein, 16 aa, Homo sapiens
CARGRGAWVQVYVDSW

SEQ ID NO: 43044 - protein, 17 aa, Homo sapiens
CAKIVVVPPAMWAFDYW

SEQ ID NO: 43045 - protein, 19 aa, Homo sapiens
CARAQYYFGSGSFQWFDPW

SEQ ID NO: 43046 - protein, 17 aa, Homo sapiens
CVKSHKSTGYYYNFDYW

SEQ ID NO: 43047 - protein, 17 aa, Homo sapiens
CSRDVNFWSGRDHFDYW

SEQ ID NO: 43048 - protein, 12 aa, Homo sapiens
CGSSNSWYSDYW

SEQ ID NO: 43049 - protein, 22 aa, Homo sapiens
CARLSGHDQYEPVTYYSPLDYW

SEQ ID NO: 43050 - protein, 22 aa, Homo sapiens
CARIFSGELVRMNYNYFYMDVW

SEQ ID NO: 43051 - protein, 24 aa, Homo sapiens
CVRRGGYCTTSSCYGYYYYYMDVW

SEQ ID NO: 43052 - protein, 19 aa, Homo sapiens
CARTHGSGGYYNEDYFDYW

SEQ ID NO: 43053 - protein, 15 aa, Homo sapiens
CARVQATAGLFLDYW

SEQ ID NO: 43054 - protein, 28 aa, Homo sapiens
CAVGHSPTRVDDDYDNNYYPGPNWFDPW

SEQ ID NO: 43055 - protein, 21 aa, Homo sapiens
CARVHFGDYQTYYYYYYMDVW

SEQ ID NO: 43056 - protein, 18 aa, Homo sapiens
CAKVSFCGPTNCYYMDVW

SEQ ID NO: 43057 - protein, 15 aa, Homo sapiens
CVTEGPGNSIYFEHW

SEQ ID NO: 43058 - protein, 16 aa, Homo sapiens
CAKEAVSVAGSDFDYW

SEQ ID NO: 43059 - protein, 15 aa, Homo sapiens
CAKDRLLVFDGFDMW

SEQ ID NO: 43060 - protein, 17 aa, Homo sapiens
CARGGSSGRHRWTFDYW

SEQ ID NO: 43061 - protein, 18 aa, Homo sapiens
CVRAPGGSDYDDDAFDIW

SEQ ID NO: 43062 - protein, 17 aa, Homo sapiens
CMQTLQTASSTNSPLTF

SEQ ID NO: 43063 - protein, 19 aa, Homo sapiens
CANSEIGANIAPAAEFNYW

SEQ ID NO: 43064 - protein, 22 aa, Homo sapiens
CTRGPLVRGVTDHLYYYYMDVW

SEQ ID NO: 43065 - protein, 17 aa, Homo sapiens
CGRDLTPLGRAYGLDYW

SEQ ID NO: 43066 - protein, 22 aa, Homo sapiens
CAKDFNPRLSYNFWSGFSGDYW

SEQ ID NO: 43067 - protein, 18 aa, Homo sapiens
CARDVRQDYGDPYKFDHW

SEQ ID NO: 43068 - protein, 21 aa, Homo sapiens
CARASSGWSSGTYTGRNFDYW

SEQ ID NO: 43069 - protein, 17 aa, Homo sapiens
CAKAPGAYSRSWYFDYW

SEQ ID NO: 43070 - protein, 19 aa, Homo sapiens
CATTMRYSDIEGHAWFDAW

SEQ ID NO: 43071 - protein, 11 aa, Homo sapiens [sequence omitted]

SEQ ID NO: 43072 - protein, 20 aa, Homo sapiens
CARSMSLDRGLLGKHAFDVW

SEQ ID NO: 43073 - protein, 18 aa, Homo sapiens
CARILNIAGVTSSWFDSW

SEQ ID NO: 43074 - protein, 17 aa, Homo sapiens
CAASSPMVTPLNWFDPW

SEQ ID NO: 43075 - protein, 15 aa, Homo sapiens
CAHTPARGVIMFDFW

SEQ ID NO: 43076 - protein, 14 aa, Homo sapiens
CARQYIGSYYFDSW

SEQ ID NO: 43077 - protein, 13 aa, Homo sapiens
CQHLNNYPLMYTF

SEQ ID NO: 43078 - protein, 24 aa, Homo sapiens
CARDYGAGPISVIIPAASDAFGLW

SEQ ID NO: 43079 - protein, 19 aa, Homo sapiens
CARHVDLCDGDCYWYFDLW

SEQ ID NO: 43080 - protein, 18 aa, Homo sapiens
CARRSDILTGLVRPCDYW

SEQ ID NO: 43081 - protein, 15 aa, Homo sapiens
CTRGGASGQYYFDYW

SEQ ID NO: 43082 - protein, 19 aa, Homo sapiens
CAKDKYTDSSGISSAIDIW

SEQ ID NO: 43083 - protein, 22 aa, Homo sapiens
CARNLEHTTGWIGLYLDAFDLW

SEQ ID NO: 43084 - protein, 21 aa, Homo sapiens
CAESRRHYYDSRGIDDAFDVW

SEQ ID NO: 43085 - protein, 14 aa, Homo sapiens
CARESGLRYYYDVW

SEQ ID NO: 43086 - protein, 14 aa, Homo sapiens
CTTDLSWNYYFDSW

SEQ ID NO: 43087 - protein, 16 aa, Homo sapiens
CAHRPGGSFVDAYDVW

SEQ ID NO: 43088 - protein, 20 aa, Homo sapiens
CAREGGYESSGSLYDAFDMW

SEQ ID NO: 43089 - protein, 20 aa, Homo sapiens
CARQGPLDRGVVITNPFDYW

SEQ ID NO: 43090 - protein, 14 aa, Homo sapiens
CVISVGDYYYMDVW

SEQ ID NO: 43091 - protein, 19 aa, Homo sapiens
CARSFASYTAKPRYHLDYW

SEQ ID NO: 43092 - protein, 16 aa, Homo sapiens
CARLGPAAPGNWFDPW

SEQ ID NO: 43093 - protein, 18 aa, Homo sapiens
CAKDPQKYRTRGHAFDIW

SEQ ID NO: 43094 - protein, 23 aa, Homo sapiens
CARENSQIEYSSTYFYYYYMDVW

SEQ ID NO: 43095 - protein, 20 aa, Homo sapiens
CARGFYGSETYYIIGAFDMW

SEQ ID NO: 43096 - protein, 21 aa, Homo sapiens
CARDYRHYDSLTGYVNWLDPW

SEQ ID NO: 43097 - protein, 18 aa, Homo sapiens
CASELLYCSSTHCPFDYW

SEQ ID NO: 43098 - protein, 25 aa, Homo sapiens
CARKIVVVPVVIPTGYSYYYYMDVW

SEQ ID NO: 43099 - protein, 19 aa, Homo sapiens
CASWATPTNAYNRGNFDFW

SEQ ID NO: 43100 - protein, 20 aa, Homo sapiens
CARKRGEYSGSTYYYYFDVW

SEQ ID NO: 43101 - protein, 26 aa, Homo sapiens
CVRPTTGGYSYDSSGYRIVTNWIDPW

SEQ ID NO: 43102 - protein, 21 aa, Homo sapiens
CARDGWFGDISSPYYQYMDVW

SEQ ID NO: 43103 - protein, 19 aa, Homo sapiens
CVIGGRNDYNAELYYFDFW

SEQ ID NO: 43104 - protein, 18 aa, Homo sapiens
CAKGSGAEYYGFYYFDNW

SEQ ID NO: 43105 - protein, 21 aa, Homo sapiens
CARGRCSGGSCYTIFDAFDMW

SEQ ID NO: 43106 - protein, 21 aa, Homo sapiens
CASDFPYRRLTKVTTGGFDIW

SEQ ID NO: 43107 - protein, 17 aa, Homo sapiens
CARTGYSVYDSFYFDFW

SEQ ID NO: 43108 - protein, 19 aa, Homo sapiens
CVRVGLDHDSGRTSWLDPW

SEQ ID NO: 43109 - protein, 14 aa, Homo sapiens
CARDGPDGGYFDPW

SEQ ID NO: 43110 - protein, 16 aa, Homo sapiens
CARLAHSGFDSDLDYW

SEQ ID NO: 43111 - protein, 22 aa, Homo sapiens
CARDRGGDLWFGVYYYYYMDVW

SEQ ID NO: 43112 - protein, 15 aa, Homo sapiens
CARRAASGTRHFDYW

SEQ ID NO: 43113 - protein, 22 aa, Homo sapiens
CAKARLYHYDTSVYRPGAFDIW

SEQ ID NO: 43114 - protein, 14 aa, Homo sapiens
CARCGGDCYYSDSW

SEQ ID NO: 43115 - protein, 16 aa, Homo sapiens
CARHLGGRYYLGRDYW

SEQ ID NO: 43116 - protein, 19 aa, Homo sapiens
CTRVPQFHFPGVGSWFDPW

SEQ ID NO: 43117 - protein, 15 aa, Homo sapiens
CSRDRAVTAPHFDSW

SEQ ID NO: 43118 - protein, 22 aa, Homo sapiens
CARDPRELQHFDWFRYNWFDPW

SEQ ID NO: 43119 - protein, 20 aa, Homo sapiens
CARDAVSTTVVIRGLAFDVW

SEQ ID NO: 43120 - protein, 18 aa, Homo sapiens
CARSGEAGTTPNRPFDYW

SEQ ID NO: 43121 - protein, 19 aa, Homo sapiens
CARDRGGRYSSGWYGFDPW

SEQ ID NO: 43122 - protein, 11 aa, Homo sapiens
CQQFNNFPPSF

SEQ ID NO: 43123 - protein, 20 aa, Homo sapiens
CARGAGYFDWVLVPQYFQLW

SEQ ID NO: 43124 - protein, 19 aa, Homo sapiens
CARDGYCHDGDCYSTVDYW

SEQ ID NO: 43125 - protein, 16 aa, Homo sapiens
CARAISSHYLSYSDYW

SEQ ID NO: 43126 - protein, 18 aa, Homo sapiens
CARSSGRRLYGDYGIDYW

SEQ ID NO: 43127 - protein, 12 aa, Homo sapiens
CARLWVGYFDHW

SEQ ID NO: 43128 - protein, 21 aa, Homo sapiens
CARQTSGGYYYGSGSYPFDYW

SEQ ID NO: 43129 - protein, 20 aa, Homo sapiens
CARGTGYCSNGRCHDAYDIW

SEQ ID NO: 43130 - protein, 21 aa, Homo sapiens
CASGYYYDSSYYTGLYYFNYW

SEQ ID NO: 43131 - protein, 17 aa, Homo sapiens
CLKDVREFSGSDHFDDW

SEQ ID NO: 43132 - protein, 20 aa, Homo sapiens
CARLRHLVAEANLFWYFDLW

SEQ ID NO: 43133 - protein, 20 aa, Homo sapiens
CARLGKYYDHQYYYYYMDVW

SEQ ID NO: 43134 - protein, 12 aa, Homo sapiens
CVRDGSGWFEYW

SEQ ID NO: 43135 - protein, 20 aa, Homo sapiens
CARDTGFSTGYTYFYYMDVW

SEQ ID NO: 43136 - protein, 13 aa, Homo sapiens
CAKVYSTYYFDSW

SEQ ID NO: 43137 - protein, 16 aa, Homo sapiens
CARDVSPGSYGAFDVW

SEQ ID NO: 43138 - protein, 16 aa, Homo sapiens
CAKGGVFVWFGDLDYW

SEQ ID NO: 43139 - protein, 15 aa, Homo sapiens
CARRGFSSNEHFDFW

SEQ ID NO: 43140 - protein, 19 aa, Homo sapiens
CARDRSMVRGVIPYYFDYW

SEQ ID NO: 43141 - protein, 17 aa, Homo sapiens
CARGLFSRLRGYWFDSW

SEQ ID NO: 43142 - protein, 18 aa, Homo sapiens
CARDCCFGSFSEGAIDIW

SEQ ID NO: 43143 - protein, 18 aa, Homo sapiens
CVKATYGDGYGRPYFDYW

SEQ ID NO: 43144 - protein, 22 aa, Homo sapiens
CTTVGSGSYYPWYYYYYYMDVW

SEQ ID NO: 43145 - protein, 15 aa, Homo sapiens
CASRAQGVYFYMDVW

SEQ ID NO: 43146 - protein, 14 aa, Homo sapiens
CARQYSPSHSFDIW

SEQ ID NO: 43147 - protein, 18 aa, Homo sapiens
CAKDSTMTTILPYYFDYW

SEQ ID NO: 43148 - protein, 16 aa, Homo sapiens
CARGITSSWQNWFDPW

SEQ ID NO: 43149 - protein, 18 aa, Homo sapiens
CVRFTTYYGVGTRYFDYW

SEQ ID NO: 43150 - protein, 14 aa, Homo sapiens
CSRLAYSFDVGDYW

SEQ ID NO: 43151 - protein, 17 aa, Homo sapiens
CTREGGGDYVNSPFDIW

SEQ ID NO: 43152 - protein, 24 aa, Homo sapiens
CARGTGRKTILVPYSMRYYYMDVW

SEQ ID NO: 43153 - protein, 13 aa, Homo sapiens
CARGSTYWYFDFW

SEQ ID NO: 43154 - protein, 17 aa, Homo sapiens
CARSLLEWLRIDPFDIW

SEQ ID NO: 43155 - protein, 16 aa, Homo sapiens
CARHHDGDYYRAFDYW

SEQ ID NO: 43156 - protein, 17 aa, Homo sapiens
CAKYLYSVNANVPFDSW

SEQ ID NO: 43157 - protein, 19 aa, Homo sapiens
CAKDADGITGTTLRYFDYW

SEQ ID NO: 43158 - protein, 17 aa, Homo sapiens
CARDAAAGYSYYYMDVW

SEQ ID NO: 43159 - protein, 15 aa, Homo sapiens
CGRAGRLSVGMGDYW

SEQ ID NO: 43160 - protein, 21 aa, Homo sapiens
CARDNPYPDDSEGYYDYKDVW

SEQ ID NO: 43161 - protein, 18 aa, Homo sapiens
CARANRGAYYFNYYMDVW

SEQ ID NO: 43162 - protein, 16 aa, Homo sapiens
CARGGSTYAPSVFDIW

SEQ ID NO: 43163 - protein, 21 aa, Homo sapiens
CARGGYCSTRSCLDYYYMDVW

SEQ ID NO: 43164 - protein, 15 aa, Homo sapiens
CAILHVGSPDYFDFW

SEQ ID NO: 43165 - protein, 19 aa, Homo sapiens
CVKDLYYYGSASYRAFDYW

SEQ ID NO: 43166 - protein, 14 aa, Homo sapiens
CATDDDVLTGFDWW

SEQ ID NO: 43167 - protein, 16 aa, Homo sapiens
CARPGRRDFGGYFDYW

SEQ ID NO: 43168 - protein, 15 aa, Homo sapiens
CARAGSSGYSDFDYW

SEQ ID NO: 43169 - protein, 22 aa, Homo sapiens
CARVRYSSGWYDESYYYYMDVW

SEQ ID NO: 43170 - protein, 14 aa, Homo sapiens
CARTEDGYNIIDYW

SEQ ID NO: 43171 - protein, 18 aa, Homo sapiens
CAMSPSGGSYPSDGFDIW

SEQ ID NO: 43172 - protein, 21 aa, Homo sapiens
CATRSPRGDHYYGSGRLHDYW

SEQ ID NO: 43173 - protein, 19 aa, Homo sapiens
CARGQDVIEVPPIDWLDPW

SEQ ID NO: 43174 - protein, 21 aa, Homo sapiens
CARDRYYDSSGYSPSYYMDVW

SEQ ID NO: 43175 - protein, 12 aa, Homo sapiens
CSRGGQMRFEYW

SEQ ID NO: 43176 - protein, 20 aa, Homo sapiens
CARDEYYNFWSGYDYYFDYW

SEQ ID NO: 43177 - protein, 17 aa, Homo sapiens
CTTAIVGSGYYYYMDVW

SEQ ID NO: 43178 - protein, 19 aa, Homo sapiens
CARGGYYDGRGHRDAFNVW

SEQ ID NO: 43179 - protein, 18 aa, Homo sapiens
CARMRLRYYDSSGWFDPW

SEQ ID NO: 43180 - protein, 15 aa, Homo sapiens
CARGGGSYPDYFDSW

SEQ ID NO: 43181 - protein, 19 aa, Homo sapiens
CARDPDQYDDYGGVAFDIW

SEQ ID NO: 43182 - protein, 19 aa, Homo sapiens
CARYGKEVFNPSFWHFDFW

SEQ ID NO: 43183 - protein, 18 aa, Homo sapiens
CARQSGRWFGELFYFDSW

SEQ ID NO: 43184 - protein, 18 aa, Homo sapiens
CAKGLDLDFDGLVYLDRW

SEQ ID NO: 43185 - protein, 13 aa, Homo sapiens
CARGGLEHGFDIW

SEQ ID NO: 43186 - protein, 22 aa, Homo sapiens
CARVIEGPGTADYYYYYYMDVW

SEQ ID NO: 43187 - protein, 22 aa, Homo sapiens
CARESIIGQCSSTSCPYYMDVW

SEQ ID NO: 43188 - protein, 17 aa, Homo sapiens
CARAPKYSSSWYYFDYW

SEQ ID NO: 43189 - protein, 22 aa, Homo sapiens
CARGPQFFEWLLLEYYYYMDVW

SEQ ID NO: 43190 - protein, 22 aa, Homo sapiens
CVKDKGEGGSRQTFASHYFDHW

SEQ ID NO: 43191 - protein, 19 aa, Homo sapiens
CTRDHCIGDSCYLDSFEYW

SEQ ID NO: 43192 - protein, 20 aa, Homo sapiens
CAKDRPNYYDKRDKFPFDSW

SEQ ID NO: 43193 - protein, 20 aa, Homo sapiens
CVREGGYCSRGTCTGQFDHW

SEQ ID NO: 43194 - protein, 12 aa, Homo sapiens
CAIDLCGRFDQW

SEQ ID NO: 43195 - protein, 14 aa, Homo sapiens
CARRLLNSYGFDYW

SEQ ID NO: 43196 - protein, 21 aa, Homo sapiens
CAHSPRFLDARAFYRTWFDPW

SEQ ID NO: 43197 - protein, 18 aa, Homo sapiens
CARDVGGPAVTFGSFDLW

SEQ ID NO: 43198 - protein, 17 aa, Homo sapiens
CASDSRWTTVTTGFDYW

SEQ ID NO: 43199 - protein, 15 aa, Homo sapiens
CARESGDEGSFFDTW

SEQ ID NO: 43200 - protein, 17 aa, Homo sapiens
CVKDFEARTIFDVFDMW

SEQ ID NO: 43201 - protein, 18 aa, Homo sapiens
CATSKVRGRGRDYYFEFW

SEQ ID NO: 43202 - protein, 20 aa, Homo sapiens
CARLVDYGSGSYYNWLFDYW

SEQ ID NO: 43203 - protein, 18 aa, Homo sapiens
CARGRSGGHDYGNWFDPW

SEQ ID NO: 43204 - protein, 16 aa, Homo sapiens
CAKDKKEVAASHFDNW

SEQ ID NO: 43205 - protein, 21 aa, Homo sapiens
CARGARGNMIVVSGPHAFDLW

SEQ ID NO: 43206 - protein, 16 aa, Homo sapiens
CARSASTGYGYYFDPW

SEQ ID NO: 43207 - protein, 20 aa, Homo sapiens
CAREAYYFDGSRPRGYFDSW

SEQ ID NO: 43208 - protein, 16 aa, Homo sapiens
CARGRLVRRLFPFDYW

SEQ ID NO: 43209 - protein, 21 aa, Homo sapiens
CAKDSVRDYDLGSYGRGFDPW

SEQ ID NO: 43210 - protein, 17 aa, Homo sapiens
CAKDPDAGVTTIEFDSW

SEQ ID NO: 43211 - protein, 20 aa, Homo sapiens
CARVVTKAEHYHFYYYMDVW

SEQ ID NO: 43212 - protein, 23 aa, Homo sapiens
CARHTDYYDSSDFRDYYYYTDVW

SEQ ID NO: 43213 - protein, 14 aa, Homo sapiens
CARERGGSTSSDYW

SEQ ID NO: 43214 - protein, 17 aa, Homo sapiens
CARHRVYQLLENAFDIW

SEQ ID NO: 43215 - protein, 11 aa, Homo sapiens [sequence omitted]

SEQ ID NO: 43216 - protein, 13 aa, Homo sapiens
CAKGWGEWEFDHW

SEQ ID NO: 43217 - protein, 18 aa, Homo sapiens
CAHRHDSGSYYSLDFDYW

SEQ ID NO: 43218 - protein, 19 aa, Homo sapiens
CAKDRRRNSGSYGGYFDYW

SEQ ID NO: 43219 - protein, 18 aa, Homo sapiens
CASDLVTTGTTFSEFDYW

SEQ ID NO: 43220 - protein, 16 aa, Homo sapiens
CAKGLSEWLPNWFDPW

SEQ ID NO: 43221 - protein, 19 aa, Homo sapiens
CARAFGYSNGLRNPNFDSW

SEQ ID NO: 43222 - protein, 22 aa, Homo sapiens
CARLRDYQDSSGYWAFDAFDMW

SEQ ID NO: 43223 - protein, 25 aa, Homo sapiens
CASTILYYYDSSGYYHGAAGAFDIW

SEQ ID NO: 43224 - protein, 15 aa, Homo sapiens
CVKGSSANWNRFDHW

SEQ ID NO: 43225 - protein, 19 aa, Homo sapiens
CARGFCSGNSCYSGPWDYW

SEQ ID NO: 43226 - protein, 20 aa, Homo sapiens
CVKDRETTSYYDNSGSLDYW

SEQ ID NO: 43227 - protein, 21 aa, Homo sapiens
CARVAAGPYYDILTGYYLDYW

SEQ ID NO: 43228 - protein, 20 aa, Homo sapiens
CAREVVAAAPGSPKDAFDIW

SEQ ID NO: 43229 - protein, 23 aa, Homo sapiens
CARDVLGYCSGGRCYGRDWFDPW

SEQ ID NO: 43230 - protein, 20 aa, Homo sapiens
CARIPPCVDDCYSPFYFDSW

SEQ ID NO: 43231 - protein, 15 aa, Homo sapiens
CATDLPEAGTGFDYW

SEQ ID NO: 43232 - protein, 17 aa, Homo sapiens
CAKEAHGSGRCGSFDPW

SEQ ID NO: 43233 - protein, 20 aa, Homo sapiens
CARAPYYYDSGAFYYPFDYW

SEQ ID NO: 43234 - protein, 15 aa, Homo sapiens
CARSFWGNYRYFDYW

SEQ ID NO: 43235 - protein, 23 aa, Homo sapiens
CAKSTIDYDDKCVFCEAIGFDYW

SEQ ID NO: 43236 - protein, 19 aa, Homo sapiens
CQSYDSAVSDGPVSGPGVF

SEQ ID NO: 43237 - protein, 15 aa, Homo sapiens
CARRNWNDLGGFDYW

SEQ ID NO: 43238 - protein, 17 aa, Homo sapiens
CARGNNYDSSGFLFDYW

SEQ ID NO: 43239 - protein, 20 aa, Homo sapiens
CARSDNVLQFLEWLGDFDYW

SEQ ID NO: 43240 - protein, 14 aa, Homo sapiens
CAKEANRDGFFDYW

SEQ ID NO: 43241 - protein, 14 aa, Homo sapiens
CARRSRSQYFFDPW

SEQ ID NO: 43242 - protein, 14 aa, Homo sapiens
CARTSTIRGPFDIW

SEQ ID NO: 43243 - protein, 22 aa, Homo sapiens
CAIPSGGYCSGGSCSPPPFDYW

SEQ ID NO: 43244 - protein, 18 aa, Homo sapiens
CARHFCSGYCSLRFFDYW

SEQ ID NO: 43245 - protein, 15 aa, Homo sapiens
CAREGHSSSWYWDYW

SEQ ID NO: 43246 - protein, 13 aa, Homo sapiens
CQQYSDWPPERLF

SEQ ID NO: 43247 - protein, 22 aa, Homo sapiens
CAKDRGWGYYYDSIGPDAFDIW

SEQ ID NO: 43248 - protein, 15 aa, Homo sapiens
CAKDRMASPFFFDYW

SEQ ID NO: 43249 - protein, 17 aa, Homo sapiens
CAKDKYDDYVAEFFQHW

SEQ ID NO: 43250 - protein, 18 aa, Homo sapiens
CARKWHGSSWYGGYFDYW

SEQ ID NO: 43251 - protein, 21 aa, Homo sapiens
CARVGSIFDYGDYGGGAFDIW

SEQ ID NO: 43252 - protein, 17 aa, Homo sapiens
CARDRPRDGYNLHIDYW

SEQ ID NO: 43253 - protein, 18 aa, Homo sapiens
CARSYSDTPSEVWYFDPW

SEQ ID NO: 43254 - protein, 17 aa, Homo sapiens
CARHQIYGGNTHPFDQW

SEQ ID NO: 43255 - protein, 19 aa, Homo sapiens
CAKDTYYDILTGYDAFDIW

SEQ ID NO: 43256 - protein, 18 aa, Homo sapiens
CTTDDILTTYYNRNFDYW

SEQ ID NO: 43257 - protein, 20 aa, Homo sapiens
CAKDGRADTGMVYYYYMDVW

SEQ ID NO: 43258 - protein, 20 aa, Homo sapiens
CAKDLSRYGSGSYYSVFDSW

SEQ ID NO: 43259 - protein, 23 aa, Homo sapiens
CARSPLTPVDVMSALKGRYFDYW

SEQ ID NO: 43260 - protein, 21 aa, Homo sapiens
CATSSWNPSTSDSYYYYMDAW

SEQ ID NO: 43261 - protein, 16 aa, Homo sapiens
CARDRPLLGYNWLDPW

SEQ ID NO: 43262 - protein, 21 aa, Homo sapiens
CARDSPLSSGSAYFYYYMDVW

SEQ ID NO: 43263 - protein, 19 aa, Homo sapiens
CAREAFAMVRGVRSDFDYW

SEQ ID NO: 43264 - protein, 20 aa, Homo sapiens
CARLFGRKDYYDSSGYLDSW

SEQ ID NO: 43265 - protein, 22 aa, Homo sapiens
CARQVSLAYTITIFGAATFDLW

SEQ ID NO: 43266 - protein, 17 aa, Homo sapiens
CARDPHGDQYWAFFDYW

SEQ ID NO: 43267 - protein, 21 aa, Homo sapiens
CARDRAYYDILTGPYGGFDYW

SEQ ID NO: 43268 - protein, 14 aa, Homo sapiens
CQSPDTSGTFRWVF

SEQ ID NO: 43269 - protein, 18 aa, Homo sapiens
CCREVYTSSWYEYFFDFW

SEQ ID NO: 43270 - protein, 20 aa, Homo sapiens
CAKAVWYQLPSSYYYYMDVW

SEQ ID NO: 43271 - protein, 13 aa, Homo sapiens
CASSFGELFFDFW

SEQ ID NO: 43272 - protein, 18 aa, Homo sapiens
CASQPLYYFDNSGYYKYW

SEQ ID NO: 43273 - protein, 26 aa, Homo sapiens
CARGAELAPWYYYGSGSYYNDWFDPW

SEQ ID NO: 43274 - protein, 11 aa, Homo sapiens
CAKDFLYSHYW

SEQ ID NO: 43275 - protein, 15 aa, Homo sapiens
CSRPAVAVADSPDYW

SEQ ID NO: 43276 - protein, 17 aa, Homo sapiens
CARAAHTSGWYFYFDYW

SEQ ID NO: 43277 - protein, 16 aa, Homo sapiens
CARGKYSSSSTVFDYW

SEQ ID NO: 43278 - protein, 21 aa, Homo sapiens
CVRVGPMGASPGYHYYYMDVW

SEQ ID NO: 43279 - protein, 21 aa, Homo sapiens
CARDRDYYASGNYYSGWFDPW

SEQ ID NO: 43280 - protein, 18 aa, Homo sapiens
CAKSGEGMHYYYYYMDVW

SEQ ID NO: 43281 - protein, 19 aa, Homo sapiens
CARDGEMATVADYNWFDPW

SEQ ID NO: 43282 - protein, 19 aa, Homo sapiens
CARDGLVSPDYQYYYMDVW

SEQ ID NO: 43283 - protein, 18 aa, Homo sapiens
CAKRPAGAAGPQRWFDPW

SEQ ID NO: 43284 - protein, 12 aa, Homo sapiens
CLLSYSGSLWLF

SEQ ID NO: 43285 - protein, 14 aa, Homo sapiens
CASNWNDAFWFDPW

SEQ ID NO: 43286 - protein, 22 aa, Homo sapiens
CARGRGLGQWLKPETVYYFDHW

SEQ ID NO: 43287 - protein, 24 aa, Homo sapiens
CAHRRAYHYHSGDDSRWSLAFDPW

SEQ ID NO: 43288 - protein, 17 aa, Homo sapiens
CARDDDLYGSGHPPDYW

SEQ ID NO: 43289 - protein, 19 aa, Homo sapiens
CSRVAEGDYYYYHFYMDVW

SEQ ID NO: 43290 - protein, 19 aa, Homo sapiens
CARDRTYYHDSSAYDFDYW

SEQ ID NO: 43291 - protein, 15 aa, Homo sapiens
CARSLSPVLWSFDSW

SEQ ID NO: 43292 - protein, 17 aa, Homo sapiens
CAKKGKQELVRGASDIW

SEQ ID NO: 43293 - protein, 20 aa, Homo sapiens
CARQGLAATGRDDYYYMDVW

SEQ ID NO: 43294 - protein, 18 aa, Homo sapiens
CAKDLYYYDSSGHAFDIW

SEQ ID NO: 43295 - protein, 21 aa, Homo sapiens
CARGYTSSTSNPRGAEYFQHW

SEQ ID NO: 43296 - protein, 20 aa, Homo sapiens
CATDLIKYYASGTSDAFDIW

SEQ ID NO: 43297 - protein, 16 aa, Homo sapiens
CARVGRWLQFFAFDIW

SEQ ID NO: 43298 - protein, 23 aa, Homo sapiens
CARDGDPSTVTPNNYYYYYMDVW

SEQ ID NO: 43299 - protein, 21 aa, Homo sapiens
CTTRWEVRGVTPPVHYYMDVW

SEQ ID NO: 43300 - protein, 22 aa, Homo sapiens
CARARYCSGGSCYPRAYYFDYW

SEQ ID NO: 43301 - protein, 15 aa, Homo sapiens
CVKANTWHDYIFDYW

SEQ ID NO: 43302 - protein, 20 aa, Homo sapiens
CARHSSRYTGNYWWTGFDPW

SEQ ID NO: 43303 - protein, 12 aa, Homo sapiens
CARETVSRFDFW

SEQ ID NO: 43304 - protein, 25 aa, Homo sapiens
CATLGYCSSSGCYGGYYHYYYMDVW

SEQ ID NO: 43305 - protein, 18 aa, Homo sapiens
CAKTGDAYDSADWYFDLW

SEQ ID NO: 43306 - protein, 22 aa, Homo sapiens
CATAQYFYYDSNGYWTKWFDPW

SEQ ID NO: 43307 - protein, 16 aa, Homo sapiens
CAKQSSGHYWAPFDTW

SEQ ID NO: 43308 - protein, 19 aa, Homo sapiens
CARALAVEGSLGSWYFDLW

SEQ ID NO: 43309 - protein, 14 aa, Homo sapiens
CARALKWLLELDYW

SEQ ID NO: 43310 - protein, 13 aa, Homo sapiens
CVRESDWDYMDVW

SEQ ID NO: 43311 - protein, 18 aa, Homo sapiens
CAKVYARGTWTEASFDIW

SEQ ID NO: 43312 - protein, 26 aa, Homo sapiens
CVRDDGVTLTLFGVPIMGKTNALDVW

SEQ ID NO: 43313 - protein, 15 aa, Homo sapiens
CTKEGYSGYGGIDYW

SEQ ID NO: 43314 - protein, 16 aa, Homo sapiens
CASPYTMHSSGYSDYW

SEQ ID NO: 43315 - protein, 22 aa, Homo sapiens
CARDSWNYYDSSGPPRGWFDPW

SEQ ID NO: 43316 - protein, 17 aa, Homo sapiens
CARPGYIGSYFGGFDIW

SEQ ID NO: 43317 - protein, 25 aa, Homo sapiens
CATTEGLHYSDTGGYPPTRYFFDLW

SEQ ID NO: 43318 - protein, 18 aa, Homo sapiens
CASASARDLLLFDVLDIW

SEQ ID NO: 43319 - protein, 18 aa, Homo sapiens
CASDVGQSSSYYYGFDNW

SEQ ID NO: 43320 - protein, 17 aa, Homo sapiens
CARGLDPVLVAVAFQHW

SEQ ID NO: 43321 - protein, 18 aa, Homo sapiens
CATPKGFTAADYHYFERW

SEQ ID NO: 43322 - protein, 22 aa, Homo sapiens
CATVPPFDFYDRSGYSYSLDYW

SEQ ID NO: 43323 - protein, 21 aa, Homo sapiens
CAREKGNILTGYYLGYYMDVW

SEQ ID NO: 43324 - protein, 14 aa, Homo sapiens
CARGNGHTYGPDYW

SEQ ID NO: 43325 - protein, 17 aa, Homo sapiens
CARIIYNYEKSGYFDYW

SEQ ID NO: 43326 - protein, 16 aa, Homo sapiens
CARLPFGELLSTFDYW

SEQ ID NO: 43327 - protein, 21 aa, Homo sapiens
CAKGYNVLRYFDWSEDAFDIW

SEQ ID NO: 43328 - protein, 20 aa, Homo sapiens
CARHLFGYYSDSGSYYFDYW

SEQ ID NO: 43329 - protein, 23 aa, Homo sapiens
CARADLARYDLSTGYSGNWFDPW

SEQ ID NO: 43330 - protein, 42 aa, Homo sapiens
CAKGDYFGSDGSGSSDNAYGSDDSGSYYNAPPVYSYWYFDLW

SEQ ID NO: 43331 - protein, 19 aa, Homo sapiens
CARASNPRWLYFSGAFDIW

SEQ ID NO: 43332 - protein, 14 aa, Homo sapiens
CAREPRQANWLDPW

SEQ ID NO: 43333 - protein, 16 aa, Homo sapiens
CARPPDSSPNEAFDLW

SEQ ID NO: 43334 - protein, 12 aa, Homo sapiens
CARESRQLGDYW

SEQ ID NO: 43335 - protein, 21 aa, Homo sapiens
CARDRNIVLMAAAKGGWFDPW

SEQ ID NO: 43336 - protein, 13 aa, Homo sapiens
CVRSSLGLGSDYW

SEQ ID NO: 43337 - protein, 19 aa, Homo sapiens
CARGRFGYDTLSFYYMDVW

SEQ ID NO: 43338 - protein, 22 aa, Homo sapiens
CATDRTIRGYCTGGRCGNFHYW

SEQ ID NO: 43339 - protein, 21 aa, Homo sapiens
CAHSSTTVTAIRETGGFFDPW

SEQ ID NO: 43340 - protein, 20 aa, Homo sapiens
CARILAYCDITTCTYSFDSW

SEQ ID NO: 43341 - protein, 29 aa, Homo sapiens
CARLLRGAAHDMVRGVLRVGDYYHYMDVW

SEQ ID NO: 43342 - protein, 22 aa, Homo sapiens
CARVHSLGGSMVITAQGYFDYW

SEQ ID NO: 43343 - protein, 16 aa, Homo sapiens
CARSLGRDGLKWFDYW

SEQ ID NO: 43344 - protein, 20 aa, Homo sapiens
CAREKASNGYYQRPNWFDPW

SEQ ID NO: 43345 - protein, 22 aa, Homo sapiens
CAKLYYDILTGYYMGDNWFDPW

SEQ ID NO: 43346 - protein, 18 aa, Homo sapiens
CATSSRGSSWYPDAFDIW

SEQ ID NO: 43347 - protein, 20 aa, Homo sapiens
CARDTLYCSITSCHYYFDHW

SEQ ID NO: 43348 - protein, 24 aa, Homo sapiens
CVRHIRKNYYDNSGYYYVNAFDVW

SEQ ID NO: 43349 - protein, 24 aa, Homo sapiens
CARVSVDALDFLEWPAPSNYFRYW

SEQ ID NO: 43350 - protein, 20 aa, Homo sapiens
CARAGGSDHYYVPGSLFDQW

SEQ ID NO: 43351 - protein, 20 aa, Homo sapiens
CARMAQRPAPGISYYYMDVW

SEQ ID NO: 43352 - protein, 12 aa, Homo sapiens
CQAWDSTTGGVF

SEQ ID NO: 43353 - protein, 24 aa, Homo sapiens
CARQRFSAITMIVVVTEEGWFDPW

SEQ ID NO: 43354 - protein, 16 aa, Homo sapiens
CARGPDDGGLYYFDHW

SEQ ID NO: 43355 - protein, 20 aa, Homo sapiens
CTRDPYNDILTGYYEGFDYW

SEQ ID NO: 43356 - protein, 15 aa, Homo sapiens
CARDDCIGNTCYFYW

SEQ ID NO: 43357 - protein, 20 aa, Homo sapiens
CVRDASGPYSSGWKTRFDPW

SEQ ID NO: 43358 - protein, 24 aa, Homo sapiens
CARNLWGSYRYSATNYHYFYMDVW

SEQ ID NO: 43359 - protein, 24 aa, Homo sapiens
CARGFRRSRLTPKRHYYYYYMDVW

SEQ ID NO: 43360 - protein, 21 aa, Homo sapiens
CAKDANAAAGLYYYYFYMDVW

SEQ ID NO: 43361 - protein, 13 aa, Homo sapiens
CVRDDTNWKPDYW

SEQ ID NO: 43362 - protein, 24 aa, Homo sapiens
CARELAKGSIAARRNYYYYYMDVW

SEQ ID NO: 43363 - protein, 15 aa, Homo sapiens
CARLIHTVDCWFDPW

SEQ ID NO: 43364 - protein, 13 aa, Homo sapiens
CQQYDGLPPGFTF

SEQ ID NO: 43365 - protein, 22 aa, Homo sapiens
CVRENITTFGVIFSPAGWFDPW

SEQ ID NO: 43366 - protein, 19 aa, Homo sapiens
CARALGSYGPGIFSHFDSW

SEQ ID NO: 43367 - protein, 16 aa, Homo sapiens
CAKYGDSSGYSIVDYW

SEQ ID NO: 43368 - protein, 18 aa, Homo sapiens
CAKAVGMSRFLEWTLDYW

SEQ ID NO: 43369 - protein, 20 aa, Homo sapiens
CARASHPLVGATRGGAFDIW

SEQ ID NO: 43370 - protein, 18 aa, Homo sapiens
CAKTYYYDSSGYGEFDYW

SEQ ID NO: 43371 - protein, 19 aa, Homo sapiens
CARDRVNTRSHKPYFLDYW

SEQ ID NO: 43372 - protein, 25 aa, Homo sapiens
CTREAYVPLRGSGRVVIVTSAFDYW

SEQ ID NO: 43373 - protein, 21 aa, Homo sapiens
CARHNTYYFDRSDYSDAFDIW

SEQ ID NO: 43374 - protein, 17 aa, Homo sapiens
CAKDMWELIRTPYMDVW

SEQ ID NO: 43375 - protein, 21 aa, Homo sapiens
CARSRPGGSGRLRYEYYFDFW

SEQ ID NO: 43376 - protein, 13 aa, Homo sapiens
CAHSEALNWFDPW

SEQ ID NO: 43377 - protein, 16 aa, Homo sapiens
CARRTNYNLAYYMDVW

SEQ ID NO: 43378 - protein, 20 aa, Homo sapiens
CARMTPDAGEVSYYYYMDVW

SEQ ID NO: 43379 - protein, 19 aa, Homo sapiens
CARLSSGNHYHVSLYFDSW

SEQ ID NO: 43380 - protein, 16 aa, Homo sapiens
CARHRSSSRGVLFDSW

SEQ ID NO: 43381 - protein, 15 aa, Homo sapiens
CARECGNDCDAFDVW

SEQ ID NO: 43382 - protein, 21 aa, Homo sapiens
CCARDLRGSSGWYRANWFDPW

SEQ ID NO: 43383 - protein, 16 aa, Homo sapiens
CARDQSRGGYDNFDYW

SEQ ID NO: 43384 - protein, 16 aa, Homo sapiens
CARPRGTSGGDWFDPW

SEQ ID NO: 43385 - protein, 16 aa, Homo sapiens
CVRQGNSGHYWVFDIW

SEQ ID NO: 43386 - protein, 18 aa, Homo sapiens
CARSGPDSGGLTDAFDIW

SEQ ID NO: 43387 - protein, 13 aa, Homo sapiens
CARSDYGDYLDYW

SEQ ID NO: 43388 - protein, 17 aa, Homo sapiens
CARGRVGASIGPYMDVW

SEQ ID NO: 43389 - protein, 18 aa, Homo sapiens
CVKDRSTYKSGWFAFDNW

SEQ ID NO: 43390 - protein, 21 aa, Homo sapiens
CVRVDGGEVVDGVTQFYFDLW

SEQ ID NO: 43391 - protein, 14 aa, Homo sapiens
CARIAPIVGALDYW

SEQ ID NO: 43392 - protein, 16 aa, Homo sapiens
CARATSGIAGPGIDYW

SEQ ID NO: 43393 - protein, 13 aa, Homo sapiens
CYASGWYDTVDVW

SEQ ID NO: 43394 - protein, 22 aa, Homo sapiens
CAISSDADFSQSMVGGTTFDSW

SEQ ID NO: 43395 - protein, 16 aa, Homo sapiens
CARAQNSGWNDAFDIW

SEQ ID NO: 43396 - protein, 20 aa, Homo sapiens
CALGPGGASLGHGGAYFDRW

SEQ ID NO: 43397 - protein, 18 aa, Homo sapiens
CTREEGDPDYYYYYMDIW

SEQ ID NO: 43398 - protein, 17 aa, Homo sapiens
CARTTLVTLRNDGLDVW

SEQ ID NO: 43399 - protein, 18 aa, Homo sapiens
CARDLSPSSGWYGGVDYW

SEQ ID NO: 43400 - protein, 16 aa, Homo sapiens
CAKGVGLGTVPNVDYW

SEQ ID NO: 43401 - protein, 19 aa, Homo sapiens
CARDWFCDGDCWTGYSDYW

SEQ ID NO: 43402 - protein, 19 aa, Homo sapiens
CVRGLGTYYYDSSGYFAYW

SEQ ID NO: 43403 - protein, 24 aa, Homo sapiens
CARHLLSRKDCNTGSCYASAFDIW

SEQ ID NO: 43404 - protein, 22 aa, Homo sapiens
CAGPLGYCSSTSCYLQGTGDYW

SEQ ID NO: 43405 - protein, 14 aa, Homo sapiens
CARERYPPFQFDYW

SEQ ID NO: 43406 - protein, 19 aa, Homo sapiens
CATGLANSKWYPHYYMDVW

SEQ ID NO: 43407 - protein, 15 aa, Homo sapiens
CSRGGYSNYDPFDCW

SEQ ID NO: 43408 - protein, 22 aa, Homo sapiens
CARGLGTWCQWFGTCSGWFDPW

SEQ ID NO: 43409 - protein, 19 aa, Homo sapiens
CARERNAFGGSRFGGFAYW

SEQ ID NO: 43410 - protein, 14 aa, Homo sapiens
CVRDSDYGGIFDHW

SEQ ID NO: 43411 - protein, 19 aa, Homo sapiens
CVKSTQYLDYFGSREFDFW

SEQ ID NO: 43412 - protein, 18 aa, Homo sapiens
CTTDLMDDTWYAEIGDYW

SEQ ID NO: 43413 - protein, 11 aa, Homo sapiens
CQPYGFSPVAF

SEQ ID NO: 43414 - protein, 17 aa, Homo sapiens
CARAPPGGWSGSVIDYW

SEQ ID NO: 43415 - protein, 17 aa, Homo sapiens
CARPPGGSLDPVWFDSW

SEQ ID NO: 43416 - protein, 23 aa, Homo sapiens
CARIELRGTFYGGYYYYYQMDVW

SEQ ID NO: 43417 - protein, 22 aa, Homo sapiens
CATASRTRVPFNYLYNYYMDVW

SEQ ID NO: 43418 - protein, 16 aa, Homo sapiens
CAKDHFSWPGGRFDYW

SEQ ID NO: 43419 - protein, 13 aa, Homo sapiens
CALLRPLYYLDYW

SEQ ID NO: 43420 - protein, 19 aa, Homo sapiens
CARPRSHRITAYPAYIDVW

SEQ ID NO: 43421 - protein, 16 aa, Homo sapiens
CARETSSSWARYFDPW

SEQ ID NO: 43422 - protein, 21 aa, Homo sapiens
CAREGVPLWFGESTFNWFDPW

SEQ ID NO: 43423 - protein, 18 aa, Homo sapiens
CARLNFFDSSPGEAFDIW

SEQ ID NO: 43424 - protein, 10 aa, Homo sapiens
CQAFGSSPAF

SEQ ID NO: 43425 - protein, 18 aa, Homo sapiens
CARLQTLWEWLPYYFDSW

SEQ ID NO: 43426 - protein, 15 aa, Homo sapiens
CVREEHMLIIPFDYW

SEQ ID NO: 43427 - protein, 24 aa, Homo sapiens
CAREHDIVVVIDAMQDYYHYMDVW

SEQ ID NO: 43428 - protein, 16 aa, Homo sapiens
CARQAGSSGYSHFDLW

SEQ ID NO: 43429 - protein, 13 aa, Homo sapiens
CVVAATTLAFDFW

SEQ ID NO: 43430 - protein, 23 aa, Homo sapiens
CARGAEIYYNDRTTYYHAGFDFW

SEQ ID NO: 43431 - protein, 18 aa, Homo sapiens
CAKDISLDDDDFYYFDAW

SEQ ID NO: 43432 - protein, 21 aa, Homo sapiens
CARGLSSYHQTKTPVRWFDPW

SEQ ID NO: 43433 - protein, 19 aa, Homo sapiens
CARDMRRLAPALTNPFDHW

SEQ ID NO: 43434 - protein, 24 aa, Homo sapiens
CARTPAEGYCSGGNCYYYYYMDVW

SEQ ID NO: 43435 - protein, 17 aa, Homo sapiens
CATDRGTSPSSNWFDPW

SEQ ID NO: 43436 - protein, 18 aa, Homo sapiens
CAKGLSIGGSGYDALDIW

SEQ ID NO: 43437 - protein, 15 aa, Homo sapiens
CTTQLGDYDRWFDPW

SEQ ID NO: 43438 - protein, 20 aa, Homo sapiens
CARDHLAPYSSSWFRWFDPW

SEQ ID NO: 43439 - protein, 46 aa, Homo sapiens
CQSLPQKEDARPPSSPPMPVIDNVFSRSEEHTSELQSLPPISYAVF

SEQ ID NO: 43440 - protein, 21 aa, Homo sapiens
CARAPLGDSGVSWSNPGFHYW

SEQ ID NO: 43441 - protein, 16 aa, Homo sapiens
CAREFGNYGDTYFDYW

SEQ ID NO: 43442 - protein, 19 aa, Homo sapiens
CAKDRGYDIFTGSNWFDPW

SEQ ID NO: 43443 - protein, 18 aa, Homo sapiens
CARHSSPWLRFEYYFDYW

SEQ ID NO: 43444 - protein, 17 aa, Homo sapiens
CAQGGEWFGDYRYFDFW

SEQ ID NO: 43445 - protein, 22 aa, Homo sapiens
CVRHLYYFDDSGDYHSEYFQHW

SEQ ID NO: 43446 - protein, 16 aa, Homo sapiens
CAREDIVESTTPFRYW

SEQ ID NO: 43447 - protein, 13 aa, Homo sapiens
CASQVLVDYGDYW

SEQ ID NO: 43448 - protein, 23 aa, Homo sapiens
CARMGVVVPAATRPKYYYYMDVW

SEQ ID NO: 43449 - protein, 19 aa, Homo sapiens
CAKDQTDHYDSPGYFFDCW

SEQ ID NO: 43450 - protein, 13 aa, Homo sapiens
CATPRERGSIDYW

SEQ ID NO: 43451 - protein, 19 aa, Homo sapiens
CARMEGDTPMVTASTFDFW

SEQ ID NO: 43452 - protein, 26 aa, Homo sapiens
CASSAGGYYYGTGSYYFEAANYFDPW

SEQ ID NO: 43453 - protein, 12 aa, Homo sapiens
CQQHGYSPRLTF

SEQ ID NO: 43454 - protein, 14 aa, Homo sapiens
CVKDHMGYMLFDYW

SEQ ID NO: 43455 - protein, 12 aa, Homo sapiens
CQQRYHWPLLSF

SEQ ID NO: 43456 - protein, 16 aa, Homo sapiens
CTTEALAGVVASFDIW

SEQ ID NO: 43457 - protein, 17 aa, Homo sapiens
CAKDRYSGYDRGGFDSW

SEQ ID NO: 43458 - protein, 13 aa, Homo sapiens
CYSTDSSGDQRIF

SEQ ID NO: 43459 - protein, 13 aa, Homo sapiens
CQSADPTGLYIIF

SEQ ID NO: 43460 - protein, 15 aa, Homo sapiens
CATSAQWLVTGFDYW

SEQ ID NO: 43461 - protein, 17 aa, Homo sapiens
CVARRSGENYWDDLDYW

SEQ ID NO: 43462 - protein, 19 aa, Homo sapiens
CAKDYDSGRYNHPAWLDSW

SEQ ID NO: 43463 - protein, 18 aa, Homo sapiens
CVRDLQIRGIISPFFDYW

SEQ ID NO: 43464 - protein, 14 aa, Homo sapiens
CARVVAFREFVDYW

SEQ ID NO: 43465 - protein, 21 aa, Homo sapiens
CARHALGAQWEQNRRPYFAFW

SEQ ID NO: 43466 - protein, 16 aa, Homo sapiens
CARQYSNSLSDAFDVW

SEQ ID NO: 43467 - protein, 19 aa, Homo sapiens
CARDFDSSSWYLNPRFDYW

SEQ ID NO: 43468 - protein, 17 aa, Homo sapiens
CTTESGYSYEGNAFDIW

SEQ ID NO: 43469 - protein, 17 aa, Homo sapiens
CAKGETTVVNPGYFQHW

SEQ ID NO: 43470 - protein, 19 aa, Homo sapiens
CARDRGVAAGGNSWYFTQW

SEQ ID NO: 43471 - protein, 16 aa, Homo sapiens
CARDLGQHLRSWFDPW

SEQ ID NO: 43472 - protein, 20 aa, Homo sapiens
CARVTRRFGDLLSYWFLDLW

SEQ ID NO: 43473 - protein, 17 aa, Homo sapiens
CARESSGYALNGLFDYW

SEQ ID NO: 43474 - protein, 18 aa, Homo sapiens
CARHQLAAARPGNFIDYW

SEQ ID NO: 43475 - protein, 18 aa, Homo sapiens
CATSAYSYESHLSWIDPW

SEQ ID NO: 43476 - protein, 17 aa, Homo sapiens
CAKGAVAAYREYWFDPW

SEQ ID NO: 43477 - protein, 17 aa, Homo sapiens
CARDQRQWLQRGRFDPW

SEQ ID NO: 43478 - protein, 18 aa, Homo sapiens
CARASQHVVVVTDQFDYW

SEQ ID NO: 43479 - protein, 20 aa, Homo sapiens
CAKGNRDSSGSYHWLYFDYW

SEQ ID NO: 43480 - protein, 17 aa, Homo sapiens
CATGPPRNWNRNPFDYW

SEQ ID NO: 43481 - protein, 18 aa, Homo sapiens
CARDVLRFSHYFFYMDVW

SEQ ID NO: 43482 - protein, 15 aa, Homo sapiens
CAREGAGAAAPYDYW

SEQ ID NO: 43483 - protein, 17 aa, Homo sapiens
CAKMEAGTVVRGIFDYW

SEQ ID NO: 43484 - protein, 21 aa, Homo sapiens
CARERFVVIMETEETSWFDPW

SEQ ID NO: 43485 - protein, 16 aa, Homo sapiens
CARDESLGGGYYIDSW

SEQ ID NO: 43486 - protein, 16 aa, Homo sapiens
CAICSSTSCYDGFEYW

SEQ ID NO: 43487 - protein, 19 aa, Homo sapiens
CARHRPSGSYIFDNAFDIW

SEQ ID NO: 43488 - protein, 19 aa, Homo sapiens
CARDDGSREWYFSPHFDYW

SEQ ID NO: 43489 - protein, 20 aa, Homo sapiens
CARDRGELYCSGGSCFFDYW

SEQ ID NO: 43490 - protein, 18 aa, Homo sapiens
CARVAGMGGYEFFFFDNW

SEQ ID NO: 43491 - protein, 22 aa, Homo sapiens
CARTSYFYDRSGYYYPDAFDIW

SEQ ID NO: 43492 - protein, 22 aa, Homo sapiens
CTTGDGHCSGDSCHRAGAFDLW

SEQ ID NO: 43493 - protein, 23 aa, Homo sapiens
CARDSSSGPWYGEENGHGAFDIW

SEQ ID NO: 43494 - protein, 19 aa, Homo sapiens
CARGPDRTGYFYHEYFQHW

SEQ ID NO: 43495 - protein, 19 aa, Homo sapiens
CVREGGVYSFDSSGRFDYW

SEQ ID NO: 43496 - protein, 13 aa, Homo sapiens
CIKEKNNGGLDYW

SEQ ID NO: 43497 - protein, 18 aa, Homo sapiens
CARDSSRNFGDYADFDYW

SEQ ID NO: 43498 - protein, 18 aa, Homo sapiens
CATSYYDRSGYYWYFDYW

SEQ ID NO: 43499 - protein, 20 aa, Homo sapiens
CASDLQHCTGPSCPEGWDYW

SEQ ID NO: 43500 - protein, 19 aa, Homo sapiens
CARDDALYCTDGVCPFDYW

SEQ ID NO: 43501 - protein, 16 aa, Homo sapiens
CARDPDFDDYGGPDYW

SEQ ID NO: 43502 - protein, 14 aa, Homo sapiens
CARQEYRSSPFDPW

SEQ ID NO: 43503 - protein, 25 aa, Homo sapiens
CAKDPEYYGPGSHSHIYYYYYMDVW

SEQ ID NO: 43504 - protein, 23 aa, Homo sapiens
CARAYYYDSSGYSKLPGWYFDLW

SEQ ID NO: 43505 - protein, 23 aa, Homo sapiens
CARLQAPRTYEFVDNTGYYFDSW

SEQ ID NO: 43506 - protein, 21 aa, Homo sapiens
CAVPHCGGDCYPEGDTAFDVW

SEQ ID NO: 43507 - protein, 25 aa, Homo sapiens
CARGHLFTYGGHSGGFGGNYYMDVW

SEQ ID NO: 43508 - protein, 16 aa, Homo sapiens
CARERWRHSDGGFDRW

SEQ ID NO: 43509 - protein, 20 aa, Homo sapiens
CASDHHANEAYYYDSSVDYW

SEQ ID NO: 43510 - protein, 18 aa, Homo sapiens
CARWNYDSTGYYYQFDYW

SEQ ID NO: 43511 - protein, 18 aa, Homo sapiens
CAPNVEIGVIIGRTLDYW

SEQ ID NO: 43512 - protein, 16 aa, Homo sapiens
CARHAVHRVLDAFDIW

SEQ ID NO: 43513 - protein, 22 aa, Homo sapiens
CAKGHCTTTTCRNYFYYYMDVW

SEQ ID NO: 43514 - protein, 17 aa, Homo sapiens
CARDRPPVVVPGAFDYW

SEQ ID NO: 43515 - protein, 17 aa, Homo sapiens
CARLISSGYDFDYFDYW

SEQ ID NO: 43516 - protein, 18 aa, Homo sapiens
CARQGDWYESNGYLVDYW

SEQ ID NO: 43517 - protein, 21 aa, Homo sapiens
CARDGYCTGGTCHSGGYFLHW

SEQ ID NO: 43518 - protein, 18 aa, Homo sapiens
CARDDWYSSGWGRSLDYW

SEQ ID NO: 43519 - protein, 15 aa, Homo sapiens
CVREFEGYADAFDIW

SEQ ID NO: 43520 - protein, 15 aa, Homo sapiens
CARHDSGVVFHFDSW

SEQ ID NO: 43521 - protein, 22 aa, Homo sapiens
CARVHDHLPLDYDNRGYYMDVW

SEQ ID NO: 43522 - protein, 23 aa, Homo sapiens
CARTYYYDRGGYSYRNINAFDMW

SEQ ID NO: 43523 - protein, 15 aa, Homo sapiens
CARQSDGGYTAMDYW

SEQ ID NO: 43524 - protein, 20 aa, Homo sapiens
CARLSHIVVVETFTGYLDYW

SEQ ID NO: 43525 - protein, 21 aa, Homo sapiens
CARQLGYCTNGVCLGYWFDPW

SEQ ID NO: 43526 - protein, 19 aa, Homo sapiens
CSSGLVDTRLDYWYYMDVW

SEQ ID NO: 43527 - protein, 19 aa, Homo sapiens
CARVPTYGSRRRYYYMDVW

SEQ ID NO: 43528 - protein, 16 aa, Homo sapiens
CAKDSYGSADGWFDPW

SEQ ID NO: 43529 - protein, 18 aa, Homo sapiens
CARREILWALPEPPFDYW

SEQ ID NO: 43530 - protein, 21 aa, Homo sapiens
CARGYCSGGTCYSLRELFDLW

SEQ ID NO: 43531 - protein, 16 aa, Homo sapiens
CARAPDILTGHYMDVW

SEQ ID NO: 43532 - protein, 14 aa, Homo sapiens
CAKDRDSGTYTEYW

SEQ ID NO: 43533 - protein, 22 aa, Homo sapiens
CARDRVITVAGIIVRTNWFDPW

SEQ ID NO: 43534 - protein, 26 aa, Homo sapiens
CARDLSYFDILTGYTGSETTNWFDPW

SEQ ID NO: 43535 - protein, 18 aa, Homo sapiens
CATSYCGGDCYWGYFDSW

SEQ ID NO: 43536 - protein, 26 aa, Homo sapiens
CARRGGTDYSYFWGQYRSKEENFDYW

SEQ ID NO: 43537 - protein, 22 aa, Homo sapiens
CAKPKDLWFGEFLPHTTAFDCW

SEQ ID NO: 43538 - protein, 22 aa, Homo sapiens
CAKPSQRYCADGSCYSGAYDVW

SEQ ID NO: 43539 - protein, 23 aa, Homo sapiens
CATLRSNNDRLSGWRFQGAFDVW

SEQ ID NO: 43540 - protein, 21 aa, Homo sapiens
CAKDLGAGLLPPLAVAGVDYW

SEQ ID NO: 43541 - protein, 18 aa, Homo sapiens
CARDKYGSYGSGTHFDYW

SEQ ID NO: 43542 - protein, 17 aa, Homo sapiens
CARGGYSSGLTAYFDHW

SEQ ID NO: 43543 - protein, 21 aa, Homo sapiens
CAKDGHHYYDSSGYYYYFDYW

SEQ ID NO: 43544 - protein, 21 aa, Homo sapiens
CAKGGGRWLQSYREVGAFDIW

SEQ ID NO: 43545 - protein, 18 aa, Homo sapiens
CALASDTFLNDFARYDYW

SEQ ID NO: 43546 - protein, 13 aa, Homo sapiens
CARWGREACFDAW

SEQ ID NO: 43547 - protein, 18 aa, Homo sapiens
CARERLTHYYDSSGFLYW

SEQ ID NO: 43548 - protein, 13 aa, Homo sapiens
CARSQNFPFFDSW

SEQ ID NO: 43549 - protein, 15 aa, Homo sapiens
CVKDRYSNWQYFDYW

SEQ ID NO: 43550 - protein, 18 aa, Homo sapiens
CVRDFASNSGWYRYFDLW

SEQ ID NO: 43551 - protein, 19 aa, Homo sapiens
CARAGYCILNNCYDAFDVW

SEQ ID NO: 43552 - protein, 19 aa, Homo sapiens
CAHRRDCGGDCYLGLFDYW

SEQ ID NO: 43553 - protein, 21 aa, Homo sapiens
CARDRFHYDGSANYAGFLDYW

SEQ ID NO: 43554 - protein, 17 aa, Homo sapiens
CARGGGVAILGLAPDYW

SEQ ID NO: 43555 - protein, 18 aa, Homo sapiens
CAKDLGTQPYSSGKFDYW

SEQ ID NO: 43556 - protein, 16 aa, Homo sapiens
CARYVVGAASFRFDQW

SEQ ID NO: 43557 - protein, 17 aa, Homo sapiens
CARDRWHGGTSEGFDSW

SEQ ID NO: 43558 - protein, 14 aa, Homo sapiens
CQQYGNSPPYMYTF

SEQ ID NO: 43559 - protein, 22 aa, Homo sapiens
CARDIWWSGYCSSASCSTLDYW

SEQ ID NO: 43560 - protein, 15 aa, Homo sapiens
CAREREYDYGTFDHW

SEQ ID NO: 43561 - protein, 15 aa, Homo sapiens
CARQQPLISNLFDYW

SEQ ID NO: 43562 - protein, 15 aa, Homo sapiens
CTKGGYGGNPHFAYW

SEQ ID NO: 43563 - protein, 16 aa, Homo sapiens
CAKGPDYGDPYYFDSW

SEQ ID NO: 43564 - protein, 15 aa, Homo sapiens
CARFSLFDGSSFDSW

SEQ ID NO: 43565 - protein, 21 aa, Homo sapiens
CARIQSTNYYSHYYYYYMDVW

SEQ ID NO: 43566 - protein, 20 aa, Homo sapiens
CARHGYGSGSTEYYYYMDVW

SEQ ID NO: 43567 - protein, 20 aa, Homo sapiens
CARDAVHYGSRRRYYYFDYW

SEQ ID NO: 43568 - protein, 24 aa, Homo sapiens
CAREGFFGSGKFYSAARWFHFDYW

SEQ ID NO: 43569 - protein, 15 aa, Homo sapiens
CASTRLSPYYYDDYW

SEQ ID NO: 43570 - protein, 23 aa, Homo sapiens
CARLPARLSVYDYGSGSYTDDYW

SEQ ID NO: 43571 - protein, 18 aa, Homo sapiens
CARYDTVGFYHLRAFDVW

SEQ ID NO: 43572 - protein, 19 aa, Homo sapiens
CAKDYCSHTNCNEGYFDSW

SEQ ID NO: 43573 - protein, 14 aa, Homo sapiens
CARDHGSWDPFDSW

SEQ ID NO: 43574 - protein, 21 aa, Homo sapiens
CAKDYDYVWGSYYGGTSFNYW

SEQ ID NO: 43575 - protein, 21 aa, Homo sapiens
CARDRFFGSRDYQYYYYMDVW

SEQ ID NO: 43576 - protein, 14 aa, Homo sapiens
CAKDRLNNSWFDSW

SEQ ID NO: 43577 - protein, 20 aa, Homo sapiens
CARVGLRKPPYYNYYYMDVW

SEQ ID NO: 43578 - protein, 17 aa, Homo sapiens
CARQREFSNSPTYYDFW

SEQ ID NO: 43579 - protein, 14 aa, Homo sapiens
CAKGLSGTTPFDYW

SEQ ID NO: 43580 - protein, 16 aa, Homo sapiens
CARHGSIAVDGEFDYW

SEQ ID NO: 43581 - protein, 18 aa, Homo sapiens
CARAALGHTYHFSYMDVW

SEQ ID NO: 43582 - protein, 16 aa, Homo sapiens
CAKDRQWLPTYDFDHW

SEQ ID NO: 43583 - protein, 23 aa, Homo sapiens
CARHRYYDGSGHYLHYYYYIDVW

SEQ ID NO: 43584 - protein, 24 aa, Homo sapiens
CARQLPQSIDISTGHSRGEAFDIW

SEQ ID NO: 43585 - protein, 20 aa, Homo sapiens
CARGQKQWLVLHPSYYFDYW

SEQ ID NO: 43586 - protein, 13 aa, Homo sapiens
CAGWNLFSYFDFW

SEQ ID NO: 43587 - protein, 16 aa, Homo sapiens
CARDLGTWYVSYFDYW

SEQ ID NO: 43588 - protein, 19 aa, Homo sapiens
CAKEKTFPWIEPGPYFDHW

SEQ ID NO: 43589 - protein, 17 aa, Homo sapiens
CAKEGYTSGWCGVFDVW

SEQ ID NO: 43590 - protein, 20 aa, Homo sapiens
CARGKVTTVLFDYYYYMDVW

SEQ ID NO: 43591 - protein, 18 aa, Homo sapiens
CAKAFYGGSGRTGAFDFW

SEQ ID NO: 43592 - protein, 20 aa, Homo sapiens
CARGVDYYDSSGSYYYFDYW

SEQ ID NO: 43593 - protein, 19 aa, Homo sapiens
CAKDVGQGLIIRGYYFDHW

SEQ ID NO: 43594 - protein, 17 aa, Homo sapiens
CVKSDGYDLNYYYLDVW

SEQ ID NO: 43595 - protein, 17 aa, Homo sapiens
CVREATAAETPTSFDPW

SEQ ID NO: 43596 - protein, 10 aa, Homo sapiens
CMHGTHWGTF

SEQ ID NO: 43597 - protein, 19 aa, Homo sapiens
CARETYYYDSSGPDAFDIW

SEQ ID NO: 43598 - protein, 27 aa, Homo sapiens
CARGLKGSDRPRSAIERWHYYYYMDVW

SEQ ID NO: 43599 - protein, 21 aa, Homo sapiens
CARASLSSYREWLLDNWFDPW

SEQ ID NO: 43600 - protein, 21 aa, Homo sapiens
CARTLYYDASGYSSPYYFDYW

SEQ ID NO: 43601 - protein, 14 aa, Homo sapiens
CAKDPGYGDIPDYW

SEQ ID NO: 43602 - protein, 17 aa, Homo sapiens
CARGRVGGWFGESIDYW

SEQ ID NO: 43603 - protein, 19 aa, Homo sapiens
CAKVGRLGYSYGPDAFDIW

SEQ ID NO: 43604 - protein, 16 aa, Homo sapiens
CANGGLRAFLGPSDYW

SEQ ID NO: 43605 - protein, 17 aa, Homo sapiens
CARHDWTSGWYTSFDYW

SEQ ID NO: 43606 - protein, 18 aa, Homo sapiens
CAARCGGDCSRNDGFDVW

SEQ ID NO: 43607 - protein, 23 aa, Homo sapiens
CAATKASLYDFLTGYYSGYFDSW

SEQ ID NO: 43608 - protein, 14 aa, Homo sapiens
CAKSDYYEGAFDIW

SEQ ID NO: 43609 - protein, 17 aa, Homo sapiens
CARGRGSQRQSDWFDPW

SEQ ID NO: 43610 - protein, 23 aa, Homo sapiens
CARLPVERSGSSKDYNYSYIDVW

SEQ ID NO: 43611 - protein, 15 aa, Homo sapiens
CATFRVETTDGFDYW

SEQ ID NO: 43612 - protein, 15 aa, Homo sapiens
CARHAAATLVGLDYW

SEQ ID NO: 43613 - protein, 17 aa, Homo sapiens
CTTRSITIFGVVIHDYW

SEQ ID NO: 43614 - protein, 13 aa, Homo sapiens
CQLRSTWPLMYTF

SEQ ID NO: 43615 - protein, 22 aa, Homo sapiens
CAKDKWDVYFGSGIIRGYCDYW

SEQ ID NO: 43616 - protein, 13 aa, Homo sapiens
CHQRTNWPPELIF

SEQ ID NO: 43617 - protein, 23 aa, Homo sapiens
CTRDHTMVRGVIMSYYYYYMDVW

SEQ ID NO: 43618 - protein, 20 aa, Homo sapiens
CAKDVIYASTWYDGGAFDYW

SEQ ID NO: 43619 - protein, 16 aa, Homo sapiens
CARLKVYSGYDFDDYW

SEQ ID NO: 43620 - protein, 15 aa, Homo sapiens
CARPRGSANWGFDYW

SEQ ID NO: 43621 - protein, 22 aa, Homo sapiens
CARVVFMNFWSGTYTGTPFDYW

SEQ ID NO: 43622 - protein, 18 aa, Homo sapiens
CARDSGYYYDSSNIFDFW

SEQ ID NO: 43623 - protein, 15 aa, Homo sapiens
CARSGYYFGHWFDPW

SEQ ID NO: 43624 - protein, 17 aa, Homo sapiens
CARARGRYTGDNWFDPW

SEQ ID NO: 43625 - protein, 18 aa, Homo sapiens
CARVEGYDSSGYPGFDIW

SEQ ID NO: 43626 - protein, 13 aa, Homo sapiens
CAREKLHSSFDYW

SEQ ID NO: 43627 - protein, 17 aa, Homo sapiens
CAKGGEFEATLSMMDYW

SEQ ID NO: 43628 - protein, 23 aa, Homo sapiens
CARIRAHFDSSGYYYYGAHFDSW

SEQ ID NO: 43629 - protein, 17 aa, Homo sapiens
CARDLVLPTTMFYFDPW

SEQ ID NO: 43630 - protein, 16 aa, Homo sapiens
CARKGDGYNQYYFDYW

SEQ ID NO: 43631 - protein, 18 aa, Homo sapiens
CAHRAGGYDWNDAFFDYW

SEQ ID NO: 43632 - protein, 16 aa, Homo sapiens
CARPRYQLLSSSFDLW

SEQ ID NO: 43633 - protein, 16 aa, Homo sapiens
CARTYISCWYCWFDPW

SEQ ID NO: 43634 - protein, 22 aa, Homo sapiens
CARSPDTYYFGRSGYQNWFDPW

SEQ ID NO: 43635 - protein, 15 aa, Homo sapiens
CARRVRGSRYYFDNW

SEQ ID NO: 43636 - protein, 17 aa, Homo sapiens
CARGSPSVTGTQAFDIW

SEQ ID NO: 43637 - protein, 14 aa, Homo sapiens
CARGTTGSSPFDYW

SEQ ID NO: 43638 - protein, 17 aa, Homo sapiens
CARVGWVQYKSFFFDTW

SEQ ID NO: 43639 - protein, 22 aa, Homo sapiens
CARAAFPGYYGTGSYLGGFDPW

SEQ ID NO: 43640 - protein, 16 aa, Homo sapiens
CARDRGEWGSWYVDYW

SEQ ID NO: 43641 - protein, 21 aa, Homo sapiens
CARGVGAGGYEEDYFWYMDVW

SEQ ID NO: 43642 - protein, 19 aa, Homo sapiens
CARDLNYYGSGSYVPFDYW

SEQ ID NO: 43643 - protein, 18 aa, Homo sapiens
CARLRSIGMVREYYMDVW

SEQ ID NO: 43644 - protein, 18 aa, Homo sapiens
CAKDVYVGGSFLGAFDSW

SEQ ID NO: 43645 - protein, 13 aa, Homo sapiens
CVRGGPGSGLDYW

SEQ ID NO: 43646 - protein, 4 aa, Homo sapiens
CQQF

SEQ ID NO: 43647 - protein, 17 aa, Homo sapiens
CATHLSADLVTTTLDYW

SEQ ID NO: 43648 - protein, 22 aa, Homo sapiens
CARQVRQSWSGSSYYTYYFDDW

SEQ ID NO: 43649 - protein, 17 aa, Homo sapiens
CAKGGGYDFVHDAFGLW

SEQ ID NO: 43650 - protein, 19 aa, Homo sapiens
CARDKVMWLGYYYSYMDVW

SEQ ID NO: 43651 - protein, 19 aa, Homo sapiens
CVRHHCSGWYCRGNWFDPW

SEQ ID NO: 43652 - protein, 22 aa, Homo sapiens
CARDIGAQIGVPGPRPYYFDHW

SEQ ID NO: 43653 - protein, 16 aa, Homo sapiens
CARSFRGDYRDAFDIW

SEQ ID NO: 43654 - protein, 17 aa, Homo sapiens
CAKDLTMVRGLNGFDYW

SEQ ID NO: 43655 - protein, 16 aa, Homo sapiens
CARHGGPNGYEHLDYW

SEQ ID NO: 43656 - protein, 14 aa, Homo sapiens
CQVWDTSTNNPRVF

SEQ ID NO: 43657 - protein, 18 aa, Homo sapiens
CAKQVRSLVGLTDYFDYW

SEQ ID NO: 43658 - protein, 23 aa, Homo sapiens
CAKDLLRCSSSTCPPITDASDVW

SEQ ID NO: 43659 - protein, 17 aa, Homo sapiens
CQVWDSSSDSSSDHYVF

SEQ ID NO: 43660 - protein, 21 aa, Homo sapiens
CARVHFYDFYETTAGEAFDIW

SEQ ID NO: 43661 - protein, 16 aa, Homo sapiens
CARVDYYDSSGYYYYW

SEQ ID NO: 43662 - protein, 17 aa, Homo sapiens
CATRSKGYSRGGGFDYW

SEQ ID NO: 43663 - protein, 19 aa, Homo sapiens
CARDRGKWLRLGPNYFDYW

SEQ ID NO: 43664 - protein, 19 aa, Homo sapiens
CARHPSRAFGGVIPWFDPW

SEQ ID NO: 43665 - protein, 13 aa, Homo sapiens
CAREILATASDYW

SEQ ID NO: 43666 - protein, 20 aa, Homo sapiens
CARRFADDWSDGYFYYMDVW

SEQ ID NO: 43667 - protein, 24 aa, Homo sapiens
CAKDFYCSSGSCYPYYYYYYLDVW

SEQ ID NO: 43668 - protein, 20 aa, Homo sapiens
CARDAVKGSGSYYNPWFDPW

SEQ ID NO: 43669 - protein, 20 aa, Homo sapiens
CARPYRDRYCSGGSCPIDYW

SEQ ID NO: 43670 - protein, 18 aa, Homo sapiens
CARSSFSIPGGGGYFDYW

SEQ ID NO: 43671 - protein, 19 aa, Homo sapiens
CARDRDVLTGYPSYYFDYW

SEQ ID NO: 43672 - protein, 18 aa, Homo sapiens
CARGGSGSNDHSGALDIW

SEQ ID NO: 43673 - protein, 15 aa, Homo sapiens
CARHGPYYSSAFHIW

SEQ ID NO: 43674 - protein, 18 aa, Homo sapiens
CAKGWEFGATVTSTLDYW

SEQ ID NO: 43675 - protein, 19 aa, Homo sapiens
CARGRTMRYSYGQAYMDVW

SEQ ID NO: 43676 - protein, 18 aa, Homo sapiens
CARDTYGGFNWGGGLDYW

SEQ ID NO: 43677 - protein, 22 aa, Homo sapiens
CARGPYYDSTGFHRGLYYMDVW

SEQ ID NO: 43678 - protein, 24 aa, Homo sapiens
CARHLRAYASMVRGVPGVSWFDPW

SEQ ID NO: 43679 - protein, 16 aa, Homo sapiens
CARGMIPLGINWFDPW

SEQ ID NO: 43680 - protein, 24 aa, Homo sapiens
CARVKVTNDSGGFRTDYYYYMDVW

SEQ ID NO: 43681 - protein, 25 aa, Homo sapiens
CVRDISGTYYYYTSGSYGGLYFDSW

SEQ ID NO: 43682 - protein, 18 aa, Homo sapiens
CARAITTVDWDGFYFEYW

SEQ ID NO: 43683 - protein, 20 aa, Homo sapiens
CARAHGDYYGSGNYGLFDYW

SEQ ID NO: 43684 - protein, 17 aa, Homo sapiens
CARGRDMVRGVRNLDYW

SEQ ID NO: 43685 - protein, 22 aa, Homo sapiens
CARDHPDSSSYGSRYYYYMDVW

SEQ ID NO: 43686 - protein, 17 aa, Homo sapiens
CARDIGTSGYDRAFDQW

SEQ ID NO: 43687 - protein, 19 aa, Homo sapiens
CVRDPELELNVFYHYMDVW

SEQ ID NO: 43688 - protein, 20 aa, Homo sapiens
CAREAPWRQLEGRAQAFDMW

SEQ ID NO: 43689 - protein, 19 aa, Homo sapiens
CVKGGHGLDGGNFLNFDVW

SEQ ID NO: 43690 - protein, 16 aa, Homo sapiens
CAKDLYNWNPSYMDVW

SEQ ID NO: 43691 - protein, 16 aa, Homo sapiens
CARAGTSLSGSIIDYW

SEQ ID NO: 43692 - protein, 16 aa, Homo sapiens
CAKTYSGSYFGYYDCW

SEQ ID NO: 43693 - protein, 17 aa, Homo sapiens
CARGSCISTTCPLFDYW

SEQ ID NO: 43694 - protein, 19 aa, Homo sapiens
CARDGPRPFDSNGFYFDLW

SEQ ID NO: 43695 - protein, 19 aa, Homo sapiens
CAKMTSGYYNYYYHYMDVW

SEQ ID NO: 43696 - protein, 17 aa, Homo sapiens
CAAESMNRGVPSGFDPW

SEQ ID NO: 43697 - protein, 21 aa, Homo sapiens
CARESDWHFSAWHGGDFFDYW

SEQ ID NO: 43698 - protein, 20 aa, Homo sapiens
CARVAEGVGGYDYNAYMDVW

SEQ ID NO: 43699 - protein, 25 aa, Homo sapiens
CARDARYCSDSTCYNSYNYYYMDVW

SEQ ID NO: 43700 - protein, 20 aa, Homo sapiens
CARYYYDSNVFYPKYFFDYW

SEQ ID NO: 43701 - protein, 28 aa, Homo sapiens
CTRDAGAPQAFLGRHPTPTGAIKGSDYW

SEQ ID NO: 43702 - protein, 19 aa, Homo sapiens
CARDPHSTGWHYYYYMDVW

SEQ ID NO: 43703 - protein, 16 aa, Homo sapiens
CATVYNYGPGNYFDKW

SEQ ID NO: 43704 - protein, 17 aa, Homo sapiens
CARQGTSGTTLGFVDYW

SEQ ID NO: 43705 - protein, 17 aa, Homo sapiens
CARVTITVVNGGPVDYW

SEQ ID NO: 43706 - protein, 16 aa, Homo sapiens
CARWGGDSAGDPFDLW

SEQ ID NO: 43707 - protein, 17 aa, Homo sapiens
CAKAERVNRLTSALDYW

SEQ ID NO: 43708 - protein, 24 aa, Homo sapiens
CARDRHRCISTNCYGGDHDGFDIW

SEQ ID NO: 43709 - protein, 21 aa, Homo sapiens
CARITNFYDNSAYPSYYFDYW

SEQ ID NO: 43710 - protein, 21 aa, Homo sapiens
CAREGASDGSGRYGYYYMDVW

SEQ ID NO: 43711 - protein, 18 aa, Homo sapiens
CVKDQSPFLGAALPFDYW

SEQ ID NO: 43712 - protein, 18 aa, Homo sapiens
CAKCTLETYYYYYYMDVW

SEQ ID NO: 43713 - protein, 22 aa, Homo sapiens
CVRDYHHLHLTYASGWYYFDFW

SEQ ID NO: 43714 - protein, 21 aa, Homo sapiens
CAKDRTWGYCSGGTCAVFDYW

SEQ ID NO: 43715 - protein, 17 aa, Homo sapiens
CARGRSQWVIQDAFDIW

SEQ ID NO: 43716 - protein, 16 aa, Homo sapiens
CRCGLLWYGDQNGDYW

SEQ ID NO: 43717 - protein, 16 aa, Homo sapiens
CARAVYSGNVEYINYW

SEQ ID NO: 43718 - protein, 20 aa, Homo sapiens
CARDVCSGTTCYVRDVFDIW

SEQ ID NO: 43719 - protein, 17 aa, Homo sapiens
CARLLLRGSGTYSLDYW

SEQ ID NO: 43720 - protein, 16 aa, Homo sapiens
CARDLWSPQGNWFDPW

SEQ ID NO: 43721 - protein, 19 aa, Homo sapiens
CVRDWGHYYDNWLDAFDVW

SEQ ID NO: 43722 - protein, 17 aa, Homo sapiens
CARDVVYYDSSGEFDYW

SEQ ID NO: 43723 - protein, 22 aa, Homo sapiens
CARDTHPYSSRWHNPYNYFDSW

SEQ ID NO: 43724 - protein, 26 aa, Homo sapiens
CAKDPRLTVVRGAIMEEESYYYMDVW

SEQ ID NO: 43725 - protein, 18 aa, Homo sapiens
CARDSGYDSSDLPIFDYW

SEQ ID NO: 43726 - protein, 17 aa, Homo sapiens
CARLSWFGLLMRTFDPW

SEQ ID NO: 43727 - protein, 20 aa, Homo sapiens
CARDLTPRRDGYSQYYFDYW

SEQ ID NO: 43728 - protein, 16 aa, Homo sapiens
CARSTGYYLNDALDIW

SEQ ID NO: 43729 - protein, 15 aa, Homo sapiens
CARGREYQLIPFDFW

SEQ ID NO: 43730 - protein, 19 aa, Homo sapiens
CARDNPDYGDYEANFFDFW

SEQ ID NO: 43731 - protein, 20 aa, Homo sapiens
CASQPPLYGDYVIWNWFDPW

SEQ ID NO: 43732 - protein, 23 aa, Homo sapiens
CARSGTPRIEATGFKRESYFDDW

SEQ ID NO: 43733 - protein, 21 aa, Homo sapiens
CARGNCRSTSCYIKLYSFDYW

SEQ ID NO: 43734 - protein, 15 aa, Homo sapiens
CARDPYRAMAQFDYW

SEQ ID NO: 43735 - protein, 14 aa, Homo sapiens
CATLRGVIQRGDYW

SEQ ID NO: 43736 - protein, 15 aa, Homo sapiens
CATSARGGWFQFDNW

SEQ ID NO: 43737 - protein, 22 aa, Homo sapiens
CARGGEIVMMVYLIPGSAFDIW

SEQ ID NO: 43738 - protein, 21 aa, Homo sapiens
CARVVIAAAARSAYYYYMDVW

SEQ ID NO: 43739 - protein, 24 aa, Homo sapiens
CAKERMKTYDPLTGYFVLNWFDPW

SEQ ID NO: 43740 - protein, 17 aa, Homo sapiens
CAREGSASVTGSPFDYW

SEQ ID NO: 43741 - protein, 26 aa, Homo sapiens
CARLEKVWAPRYLGGTVTAHFYFDSW

SEQ ID NO: 43742 - protein, 16 aa, Homo sapiens
CSRSNILTPYNWLDPW

SEQ ID NO: 43743 - protein, 19 aa, Homo sapiens
CAKAYPTGGDYSVYYFDYW

SEQ ID NO: 43744 - protein, 16 aa, Homo sapiens
CARDLLGNWGTDFDYW

SEQ ID NO: 43745 - protein, 22 aa, Homo sapiens
CASYGWIQLWFGDPAASYFDYW

SEQ ID NO: 43746 - protein, 16 aa, Homo sapiens
CARENGGNSAMPFDYW

SEQ ID NO: 43747 - protein, 17 aa, Homo sapiens
CVKEGYYDASGRYFDLW

SEQ ID NO: 43748 - protein, 17 aa, Homo sapiens
CVRDVDTTTHLNRFDPW

SEQ ID NO: 43749 - protein, 20 aa, Homo sapiens
CVRPSSYHSSGFYSDAFDIW

SEQ ID NO: 43750 - protein, 18 aa, Homo sapiens
CARDSALYYYGGGGFDYW

SEQ ID NO: 43751 - protein, 20 aa, Homo sapiens
CARVSSERFGYYETYFFDNW

SEQ ID NO: 43752 - protein, 18 aa, Homo sapiens
CARDGAPFTTLDYYMDVW

SEQ ID NO: 43753 - protein, 17 aa, Homo sapiens
CARDRNRGVIPDAFDIW

SEQ ID NO: 43754 - protein, 19 aa, Homo sapiens
CTTDIIRDSRGRYDKVDYW

SEQ ID NO: 43755 - protein, 21 aa, Homo sapiens
CAKDTTFNYYYDSPSYYFDYW

SEQ ID NO: 43756 - protein, 21 aa, Homo sapiens
CARGTVGVRGVPTYYYYMDVW

SEQ ID NO: 43757 - protein, 13 aa, Homo sapiens [sequence omitted]

SEQ ID NO: 43758 - protein, 14 aa, Homo sapiens
CVKMEMATVGFDYW

SEQ ID NO: 43759 - protein, 25 aa, Homo sapiens
CARFPPDPMARGSNFWFYYYYMDVW

SEQ ID NO: 43760 - protein, 17 aa, Homo sapiens
CARHVVITSRGPDFDYW

SEQ ID NO: 43761 - protein, 16 aa, Homo sapiens
CASAEDDANSGYFDYW

SEQ ID NO: 43762 - protein, 24 aa, Homo sapiens
CARVSSRFSEESRIYYYYYNMDVW

SEQ ID NO: 43763 - protein, 18 aa, Homo sapiens
CARNKAVASTTDFFLDYW

SEQ ID NO: 43764 - protein, 17 aa, Homo sapiens
CARTSDSNDRKASFDYW

SEQ ID NO: 43765 - protein, 18 aa, Homo sapiens
CARGYYYGSAVTWYFDLW

SEQ ID NO: 43766 - protein, 16 aa, Homo sapiens
CARTDYGSNSYYFDSW

SEQ ID NO: 43767 - protein, 21 aa, Homo sapiens
CVKDAEETYYDSSGYFLFDYW

SEQ ID NO: 43768 - protein, 21 aa, Homo sapiens
CASQGYSGYETAFYYYYMDVW

SEQ ID NO: 43769 - protein, 22 aa, Homo sapiens
CAKDRDFGVGTDYYSHYYMDVW

SEQ ID NO: 43770 - protein, 22 aa, Homo sapiens
CARSQAPTFYSGSSDLSETDYW

SEQ ID NO: 43771 - protein, 21 aa, Homo sapiens
CARDYCSSISCYYHYYHMDVW

SEQ ID NO: 43772 - protein, 20 aa, Homo sapiens
CARAMTFGGVIVIEDPFDIW

SEQ ID NO: 43773 - protein, 14 aa, Homo sapiens
CARYSYGDSYHDYW

SEQ ID NO: 43774 - protein, 23 aa, Homo sapiens
CARGEAYDVLSGYYVFVNAFDIW

SEQ ID NO: 43775 - protein, 23 aa, Homo sapiens
CAKDTSPDTLLHTGDWYGGFDLW

SEQ ID NO: 43776 - protein, 16 aa, Homo sapiens
CAKAYWGAVVNPFDSW

SEQ ID NO: 43777 - protein, 23 aa, Homo sapiens
CAREMRGAIWDIVATITGVFDYW

SEQ ID NO: 43778 - protein, 22 aa, Homo sapiens
CARERDGYYFERSASENWFDPW

SEQ ID NO: 43779 - protein, 17 aa, Homo sapiens
CARDVDTSSHYGWFDPW

SEQ ID NO: 43780 - protein, 20 aa, Homo sapiens
CARDDGGGNSGYYYYYMDVW

SEQ ID NO: 43781 - protein, 20 aa, Homo sapiens
CARDYGDYVGKGRSYYFDYW

SEQ ID NO: 43782 - protein, 20 aa, Homo sapiens
CARGEIAAADRYYYYYMDVW

SEQ ID NO: 43783 - protein, 21 aa, Homo sapiens
CASLVEEDVPYTSDFYYFDSW

SEQ ID NO: 43784 - protein, 17 aa, Homo sapiens
CARGKEMTTMRGPFDIW

SEQ ID NO: 43785 - protein, 18 aa, Homo sapiens
CARRLEDSSSWYNWFDPW

SEQ ID NO: 43786 - protein, 23 aa, Homo sapiens
CAKGSRHPYGSGSYYRFNWFDPW

SEQ ID NO: 43787 - protein, 24 aa, Homo sapiens
CARGKDETALANLFSYYYYYTDVW

SEQ ID NO: 43788 - protein, 22 aa, Homo sapiens
CARQRGYGDYQGYYYYFYMDVW

SEQ ID NO: 43789 - protein, 20 aa, Homo sapiens
CARRGVYTGYVSVSYFFDYW

SEQ ID NO: 43790 - protein, 17 aa, Homo sapiens
CARRRYFGSGSYGFDIW

SEQ ID NO: 43791 - protein, 18 aa, Homo sapiens
CARGVRVWSGYFGYFDYW

SEQ ID NO: 43792 - protein, 15 aa, Homo sapiens
CARDQVRYTYYMDVW

SEQ ID NO: 43793 - protein, 16 aa, Homo sapiens
CAGMEFSYGSRRFDPW

SEQ ID NO: 43794 - protein, 18 aa, Homo sapiens
CARAPYGTGDWGHYMDVW

SEQ ID NO: 43795 - protein, 19 aa, Homo sapiens
CVRGKGIYYFDSSAYAYYW

SEQ ID NO: 43796 - protein, 21 aa, Homo sapiens
CASVHYYYDRSASYFQYFPYW

SEQ ID NO: 43797 - protein, 21 aa, Homo sapiens
CARRYYDTEIGYYVPYYMDVW

SEQ ID NO: 43798 - protein, 17 aa, Homo sapiens
CARGYSTWYGDYYMDVW

SEQ ID NO: 43799 - protein, 18 aa, Homo sapiens
CATGGLVATMDFWSFDYW

SEQ ID NO: 43800 - protein, 16 aa, Homo sapiens
CARLKVYDGFNFDESW

SEQ ID NO: 43801 - protein, 18 aa, Homo sapiens
CARRSERDYYYYNYMDVW

SEQ ID NO: 43802 - protein, 19 aa, Homo sapiens
CARDVSNSPNGDNNWYDPW

SEQ ID NO: 43803 - protein, 19 aa, Homo sapiens
CAKAYSSGWTLFYSYMDVW

SEQ ID NO: 43804 - protein, 11 aa, Homo sapiens
CQSAGSRGTLF

SEQ ID NO: 43805 - protein, 9 aa, Homo sapiens
CIKGVFDSW

SEQ ID NO: 43806 - protein, 19 aa, Homo sapiens
CARDWGAPPSGGSYYLDFW

SEQ ID NO: 43807 - protein, 19 aa, Homo sapiens
CATALMIVVDPPNDAFDIW

SEQ ID NO: 43808 - protein, 17 aa, Homo sapiens
CAKDRLRYSGTYTADYW

SEQ ID NO: 43809 - protein, 18 aa, Homo sapiens
CARRSCGSRDYSDPFDIW

SEQ ID NO: 43810 - protein, 18 aa, Homo sapiens
CARDRRRMIVVPASFDIW

SEQ ID NO: 43811 - protein, 18 aa, Homo sapiens
CARDHLDWTGRSDGFDIW

SEQ ID NO: 43812 - protein, 18 aa, Homo sapiens
CAKVNTIFGVVNYPVDYW

SEQ ID NO: 43813 - protein, 22 aa, Homo sapiens
CARDLYYFDNSGEYHREYLQHW

SEQ ID NO: 43814 - protein, 17 aa, Homo sapiens
CARSFLYGSSRSTFDSW

SEQ ID NO: 43815 - protein, 20 aa, Homo sapiens
CARGIEDYYDSPGCLPLDYW

SEQ ID NO: 43816 - protein, 20 aa, Homo sapiens
CARGSSQNIRGYYHYYMDVW

SEQ ID NO: 43817 - protein, 20 aa, Homo sapiens
CATFSFEMATMDDRYAFEIW

SEQ ID NO: 43818 - protein, 17 aa, Homo sapiens
CARDYYGSGGNWHFDLW

SEQ ID NO: 43819 - protein, 17 aa, Homo sapiens
CARERHESAGLDAFDVW

SEQ ID NO: 43820 - protein, 17 aa, Homo sapiens
CARVAMVRGVNDAFDIW

SEQ ID NO: 43821 - protein, 20 aa, Homo sapiens
CVHAPYCYDSDSYYGDFDFW

SEQ ID NO: 43822 - protein, 16 aa, Homo sapiens
CARVATGYNSYYLDYW

SEQ ID NO: 43823 - protein, 16 aa, Homo sapiens
CARGYSTGYFGAFDLW

SEQ ID NO: 43824 - protein, 14 aa, Homo sapiens
CAISGWSSSYFDYW

SEQ ID NO: 43825 - protein, 24 aa, Homo sapiens
CARGLYNYGSENSYNFYYYYMDVW

SEQ ID NO: 43826 - protein, 15 aa, Homo sapiens
CQSADSGYNYVPYVF

SEQ ID NO: 43827 - protein, 16 aa, Homo sapiens
CARPKDGIRADAFDLW

SEQ ID NO: 43828 - protein, 25 aa, Homo sapiens
CARDPGGPTYHYYSSTYASRAFDFW

SEQ ID NO: 43829 - protein, 17 aa, Homo sapiens
CATREGTTVAIYYMDVW

SEQ ID NO: 43830 - protein, 19 aa, Homo sapiens
CATIPDYYGSGSLHAFDIW

SEQ ID NO: 43831 - protein, 17 aa, Homo sapiens
CAREFRSDYYGGFFDPW

SEQ ID NO: 43832 - protein, 18 aa, Homo sapiens
CAKHQTVVRGVRNAFDFW

SEQ ID NO: 43833 - protein, 21 aa, Homo sapiens
CAKEVLLVSAPIDPTYVFDPW

SEQ ID NO: 43834 - protein, 16 aa, Homo sapiens
CARDRTWLQLDHFDYW

SEQ ID NO: 43835 - protein, 17 aa, Homo sapiens
CARFFRVGASRDASDLW

SEQ ID NO: 43836 - protein, 17 aa, Homo sapiens
CARDRRASTWYNYFDSW

SEQ ID NO: 43837 - protein, 19 aa, Homo sapiens
CARDKYYFDSSGYYYFDSW

SEQ ID NO: 43838 - protein, 16 aa, Homo sapiens
CARPSNESYYAPFDYW

SEQ ID NO: 43839 - protein, 24 aa, Homo sapiens
CARAAGEGFGPGSYYGTHYYFDSW

SEQ ID NO: 43840 - protein, 13 aa, Homo sapiens
CQAWDTTTASVVF

SEQ ID NO: 43841 - protein, 23 aa, Homo sapiens
CVTTDRGLTYNYIWSGSYYFHYW

SEQ ID NO: 43842 - protein, 21 aa, Homo sapiens
CAQDSEHSKYYYYNSGYYSYW

SEQ ID NO: 43843 - protein, 24 aa, Homo sapiens
CARRSTPLPKRYFDWLYLDAFDIW

SEQ ID NO: 43844 - protein, 15 aa, Homo sapiens
CARDSWATLYYFDYW

SEQ ID NO: 43845 - protein, 18 aa, Homo sapiens
CARLNILLGYYKGAFDYW

SEQ ID NO: 43846 - protein, 25 aa, Homo sapiens
CARVMAQDFDWLRKAFYYYYYMDVW

SEQ ID NO: 43847 - protein, 17 aa, Homo sapiens
CARDRIPGAGKDAFDIW

SEQ ID NO: 43848 - protein, 16 aa, Homo sapiens
CARSRRDDYGDYADYW

SEQ ID NO: 43849 - protein, 13 aa, Homo sapiens
CAREIASAGFEYW

SEQ ID NO: 43850 - protein, 12 aa, Homo sapiens
CAAWDVTLSGLF

SEQ ID NO: 43851 - protein, 15 aa, Homo sapiens
CARGGRGDAEYFQDW

SEQ ID NO: 43852 - protein, 17 aa, Homo sapiens
CARDEDAYNSLYYFDYW

SEQ ID NO: 43853 - protein, 18 aa, Homo sapiens
CARDPGDDSSGYHYFDYW

SEQ ID NO: 43854 - protein, 20 aa, Homo sapiens
CARDLAPNMIWGRVDWFDPW

SEQ ID NO: 43855 - protein, 15 aa, Homo sapiens
CVKPRVFDWLYFDFW

SEQ ID NO: 43856 - protein, 19 aa, Homo sapiens
CARDPTPHYYDSSDGFDYW

SEQ ID NO: 43857 - protein, 20 aa, Homo sapiens
CVTDSDETSYYYYFYYLDVW

SEQ ID NO: 43858 - protein, 20 aa, Homo sapiens
CARDRRNSYGSRRKYYFDYW

SEQ ID NO: 43859 - protein, 15 aa, Homo sapiens
CARGPTGSANWFDPW

SEQ ID NO: 43860 - protein, 21 aa, Homo sapiens
CARDFPTVLLWFGGSLNLDYW

SEQ ID NO: 43861 - protein, 19 aa, Homo sapiens
CAKDRNTNFGVAGHGFDYW

SEQ ID NO: 43862 - protein, 21 aa, Homo sapiens
CASDLVGYFGSGSPPGYFDNW

SEQ ID NO: 43863 - protein, 19 aa, Homo sapiens
CAKDHYDILTGSAHAFDIW

SEQ ID NO: 43864 - protein, 17 aa, Homo sapiens
CARVLEAPHYYYYMDVW

SEQ ID NO: 43865 - protein, 13 aa, Homo sapiens
CARDPNGDGFDLW

SEQ ID NO: 43866 - protein, 24 aa, Homo sapiens
CARGAVTLIRGATPSNYYYYMDVW

SEQ ID NO: 43867 - protein, 18 aa, Homo sapiens
CARDRGEQWQVQSWLDPW

SEQ ID NO: 43868 - protein, 23 aa, Homo sapiens
CAKSPGEGFGSGSYYGTHYFDNW

SEQ ID NO: 43869 - protein, 22 aa, Homo sapiens
CASPPRYNFWSGFRPSDVFDIW

SEQ ID NO: 43870 - protein, 15 aa, Homo sapiens
CARSGYSGYDYLGYW

SEQ ID NO: 43871 - protein, 21 aa, Homo sapiens
CATDPPVFYFDSSTYRGNDYW

SEQ ID NO: 43872 - protein, 15 aa, Homo sapiens
CARARVRAPGRSDYW

SEQ ID NO: 43873 - protein, 12 aa, Homo sapiens
CAKPWAQGFDYW

SEQ ID NO: 43874 - protein, 16 aa, Homo sapiens
CAKEQNGRMVENFDSW

SEQ ID NO: 43875 - protein, 16 aa, Homo sapiens
CARDRPPGIVDGFDMW

SEQ ID NO: 43876 - protein, 19 aa, Homo sapiens
CARLGGSTVAGPWDFFDYW

SEQ ID NO: 43877 - protein, 15 aa, Homo sapiens
CQVCDSISDHADVVF

SEQ ID NO: 43878 - protein, 19 aa, Homo sapiens
CARHYGSGSYSRPNWFGPW

SEQ ID NO: 43879 - protein, 17 aa, Homo sapiens
CARVMNGYSGYDVFDYW

SEQ ID NO: 43880 - protein, 20 aa, Homo sapiens
CARVGYCSGGSCYYYAFDIW

SEQ ID NO: 43881 - protein, 18 aa, Homo sapiens
CARDSPFSGTQYNLFDFW

SEQ ID NO: 43882 - protein, 24 aa, Homo sapiens
CARDVRVDGVLLPTNVPNDAFDIW

SEQ ID NO: 43883 - protein, 16 aa, Homo sapiens
CAKDGGLAALNTFDSW

SEQ ID NO: 43884 - protein, 20 aa, Homo sapiens
CARDRVGYSSGYYLGWFDLW

SEQ ID NO: 43885 - protein, 19 aa, Homo sapiens
CARSTQDQWLTKLQGIDYW

SEQ ID NO: 43886 - protein, 21 aa, Homo sapiens
CARDRRPRTLYSSGWYCFDYW

SEQ ID NO: 43887 - protein, 23 aa, Homo sapiens
CARETAGVVTRQTTMVRGATDYW

SEQ ID NO: 43888 - protein, 11 aa, Homo sapiens
CAKGGWYPDFW

SEQ ID NO: 43889 - protein, 15 aa, Homo sapiens
CASWRWLQSGGFDYW

SEQ ID NO: 43890 - protein, 19 aa, Homo sapiens
CARGYSYDTSGNGGAFKIW

SEQ ID NO: 43891 - protein, 20 aa, Homo sapiens
CSRLGEIVVIPTGWGYMDVW

SEQ ID NO: 43892 - protein, 21 aa, Homo sapiens
CARDGSGSYQKPRFENWFDPW

SEQ ID NO: 43893 - protein, 21 aa, Homo sapiens
CVKDSGDYYGSGTYSAYFHYW

SEQ ID NO: 43894 - protein, 15 aa, Homo sapiens
CSRLFRENSRYFDYW

SEQ ID NO: 43895 - protein, 18 aa, Homo sapiens
CARLPRPGYDRAYYFDYW

SEQ ID NO: 43896 - protein, 23 aa, Homo sapiens
CARHVGGFRFLDWLRHRLGFDYW

SEQ ID NO: 43897 - protein, 24 aa, Homo sapiens
CARLIPLLWFGEFSTSPSGRFDPW

SEQ ID NO: 43898 - protein, 19 aa, Homo sapiens
CARDWGGTYSSSHYYMDVW

SEQ ID NO: 43899 - protein, 19 aa, Homo sapiens
CARDLEAYCGGDCLAFDYW

SEQ ID NO: 43900 - protein, 19 aa, Homo sapiens
CARDNFYGSGSYYGGHDYW

SEQ ID NO: 43901 - protein, 17 aa, Homo sapiens
CARVNFWSGSFNCFDPW

SEQ ID NO: 43902 - protein, 21 aa, Homo sapiens
CARSITMIVVVLATDGAFDIW

SEQ ID NO: 43903 - protein, 15 aa, Homo sapiens
CAHTSDGLPVTFDYW

SEQ ID NO: 43904 - protein, 16 aa, Homo sapiens
CSRDVERYGDYTFDYW

SEQ ID NO: 43905 - protein, 17 aa, Homo sapiens
CARDRSGSAYSKYFHLW

SEQ ID NO: 43906 - protein, 22 aa, Homo sapiens
CAKRVHVYGGQSIGYYNYDDVW

SEQ ID NO: 43907 - protein, 21 aa, Homo sapiens
CARLGSIAARRRYYYYYMDVW

SEQ ID NO: 43908 - protein, 20 aa, Homo sapiens
CARLRFYYDSGGFTGYFESW

SEQ ID NO: 43909 - protein, 14 aa, Homo sapiens
CARGVVVNAVSDYW

SEQ ID NO: 43910 - protein, 18 aa, Homo sapiens
CARALDSSRKYYYYMDVW

SEQ ID NO: 43911 - protein, 18 aa, Homo sapiens
CAKGTLATAALGYYFDSW

SEQ ID NO: 43912 - protein, 18 aa, Homo sapiens
CATLGGTGDIRLGWFDPW

SEQ ID NO: 43913 - protein, 11 aa, Homo sapiens
CAKQHDGLDYW

SEQ ID NO: 43914 - protein, 23 aa, Homo sapiens
CERSGNSPDISSWSRPPSYYDYW

SEQ ID NO: 43915 - protein, 14 aa, Homo sapiens
CARVYDLSRPFDYW

SEQ ID NO: 43916 - protein, 28 aa, Homo sapiens
CARAPNYYDSSGYYYVSHDYYYYYMDVW

SEQ ID NO: 43917 - protein, 11 aa, Homo sapiens
CQAGDSSTVPF

SEQ ID NO: 43918 - protein, 18 aa, Homo sapiens
CARAPIVVLTAPYYFDYW

SEQ ID NO: 43919 - protein, 19 aa, Homo sapiens
CATRWGRTRAGTRSESDYW

SEQ ID NO: 43920 - protein, 20 aa, Homo sapiens
CAHGGTYSDETGYYYGFDQW

SEQ ID NO: 43921 - protein, 25 aa, Homo sapiens
CARGLRGDGYNARSTFYYYYYMDVW

SEQ ID NO: 43922 - protein, 14 aa, Homo sapiens
CVQDSGSHNYFDSW

SEQ ID NO: 43923 - protein, 16 aa, Homo sapiens
CARHFWSMRPDAFDIW

SEQ ID NO: 43924 - protein, 15 aa, Homo sapiens
CARSRVRGVDYLAYW

SEQ ID NO: 43925 - protein, 15 aa, Homo sapiens
CAKDQGVEGGVFDYW

SEQ ID NO: 43926 - protein, 20 aa, Homo sapiens
CARDSIAVAGTVPLHYFDYW

SEQ ID NO: 43927 - protein, 13 aa, Homo sapiens
CARHSGVVIIDYW

SEQ ID NO: 43928 - protein, 25 aa, Homo sapiens
CARQAYCGDDCYSITPDYYYYMDFW

SEQ ID NO: 43929 - protein, 19 aa, Homo sapiens
CTCSHYYENSGFYYAFDYW

SEQ ID NO: 43930 - protein, 17 aa, Homo sapiens
CARSLDENYGDYHFDYW

SEQ ID NO: 43931 - protein, 17 aa, Homo sapiens
CAKDQVSHDYGSGFDNW

SEQ ID NO: 43932 - protein, 25 aa, Homo sapiens
CTNERMGRYFESSGYYHYYEYMDVW

SEQ ID NO: 43933 - protein, 21 aa, Homo sapiens
CARVGLAYCGGDCYPYYFDYW

SEQ ID NO: 43934 - protein, 16 aa, Homo sapiens
CTRDIPVAPSGQFDYW

SEQ ID NO: 43935 - protein, 26 aa, Homo sapiens
CARDRGIVRNYDSGRLTYYYYYMDVW

SEQ ID NO: 43936 - protein, 16 aa, Homo sapiens
CARVITAEFEYYFDHW

SEQ ID NO: 43937 - protein, 22 aa, Homo sapiens
CVREARITTGMTTVTTDAFDVW

SEQ ID NO: 43938 - protein, 22 aa, Homo sapiens
CARGAIASDINYYNVPDALDVW

SEQ ID NO: 43939 - protein, 15 aa, Homo sapiens
CARHSRYFDWMIDYW

SEQ ID NO: 43940 - protein, 24 aa, Homo sapiens
CARVSVDTGGNQLLRKADYGFDLW

SEQ ID NO: 43941 - protein, 17 aa, Homo sapiens
CARDQGALHGDYYFDHW

SEQ ID NO: 43942 - protein, 20 aa, Homo sapiens
CASLWAYYGSGSYRGWFDPW

SEQ ID NO: 43943 - protein, 17 aa, Homo sapiens
CARSRSGWFLHSDLDYW

SEQ ID NO: 43944 - protein, 15 aa, Homo sapiens
CTTGLSVGIYYFDYW

SEQ ID NO: 43945 - protein, 17 aa, Homo sapiens
CARRFGDGFWSGFFDHW

SEQ ID NO: 43946 - protein, 17 aa, Homo sapiens
CARPNYSSSGTYYIDYW

SEQ ID NO: 43947 - protein, 18 aa, Homo sapiens
CAKSTGTAAAGPNGFDMW

SEQ ID NO: 43948 - protein, 23 aa, Homo sapiens
CARLLCSSTSCSFYYYYYYMDVW

SEQ ID NO: 43949 - protein, 18 aa, Homo sapiens
CARENSSSWYGFGYFQHW

SEQ ID NO: 43950 - protein, 20 aa, Homo sapiens
CARGPELPFLEYLSSSFDPW

SEQ ID NO: 43951 - protein, 18 aa, Homo sapiens
CARGDSVGFYSDNWFDPW

SEQ ID NO: 43952 - protein, 20 aa, Homo sapiens
CAKSLNFYGSGTPRYYFDYW

SEQ ID NO: 43953 - protein, 19 aa, Homo sapiens
CAKDTSYGGKDTPYYFDYW

SEQ ID NO: 43954 - protein, 14 aa, Homo sapiens
CATDIAKGGNFDNW

SEQ ID NO: 43955 - protein, 18 aa, Homo sapiens
CAKAVYCSGGSCYFFDYW

SEQ ID NO: 43956 - protein, 14 aa, Homo sapiens
CAHSNSNGWDFDYW

SEQ ID NO: 43957 - protein, 15 aa, Homo sapiens
CAREIWLQSWFFDSW

SEQ ID NO: 43958 - protein, 21 aa, Homo sapiens
CTSFLYYYDSSGYYSDAFDIW

SEQ ID NO: 43959 - protein, 26 aa, Homo sapiens
CARARPNWSSNWSSGLYYYYYYMDVW

SEQ ID NO: 43960 - protein, 14 aa, Homo sapiens
CARSRAARLGFDYW

SEQ ID NO: 43961 - protein, 18 aa, Homo sapiens
CARHPLGSSGYYRPFDYW

SEQ ID NO: 43962 - protein, 22 aa, Homo sapiens
CARIPNHALLWFGESNDWFDPW

SEQ ID NO: 43963 - protein, 20 aa, Homo sapiens
CARFPLLLRYFDWVGAVDYW

SEQ ID NO: 43964 - protein, 21 aa, Homo sapiens
CARGGRSWDMDKPLANPFDYW

SEQ ID NO: 43965 - protein, 17 aa, Homo sapiens
CARVGQQLVGSGWFDPW

SEQ ID NO: 43966 - protein, 18 aa, Homo sapiens
CATLKQYGDYGGRGFDYW

SEQ ID NO: 43967 - protein, 19 aa, Homo sapiens
CVKDMRDGYNYEFFAFDVW

SEQ ID NO: 43968 - protein, 23 aa, Homo sapiens
CARGPTYHYETRGPYYYSYMDVW

SEQ ID NO: 43969 - protein, 24 aa, Homo sapiens
CARAHSGNFDYSGYYPGNDAFDFW

SEQ ID NO: 43970 - protein, 18 aa, Homo sapiens
CARDRIRDYGDPAPYDYW

SEQ ID NO: 43971 - protein, 21 aa, Homo sapiens
CAREFRLFYYNNGGRGFFDYW

SEQ ID NO: 43972 - protein, 15 aa, Homo sapiens
CQSYDNSLSNFRWVF

SEQ ID NO: 43973 - protein, 19 aa, Homo sapiens
CAKDLWESSGYYYGAFDIW

SEQ ID NO: 43974 - protein, 26 aa, Homo sapiens
CARVPCWPGSGGSCSMSQSDNWFDPW

SEQ ID NO: 43975 - protein, 18 aa, Homo sapiens
CAKVALRMTTVTAYFDYW

SEQ ID NO: 43976 - protein, 15 aa, Homo sapiens
CARGVRGHLPAFDSW

SEQ ID NO: 43977 - protein, 25 aa, Homo sapiens
CARDPRPPWDSSGYEITYYYYMDVW

SEQ ID NO: 43978 - protein, 21 aa, Homo sapiens
CARDPGRGWYPYNYYYYIDVW

SEQ ID NO: 43979 - protein, 14 aa, Homo sapiens
CAREEEYSSSFCYW

SEQ ID NO: 43980 - protein, 15 aa, Homo sapiens
CAIGLGRTGWYIDYW

SEQ ID NO: 43981 - protein, 19 aa, Homo sapiens
CARSPVRSGSDWSYYFDYW

SEQ ID NO: 43982 - protein, 17 aa, Homo sapiens
CARDAGHSSGFDAFDIW

SEQ ID NO: 43983 - protein, 17 aa, Homo sapiens
CARLYITVIKPDAVDVW

SEQ ID NO: 43984 - protein, 19 aa, Homo sapiens
CAKSYYYDSSAHAGFFDYW

SEQ ID NO: 43985 - protein, 14 aa, Homo sapiens
CPASLATPGGFDVW

SEQ ID NO: 43986 - protein, 17 aa, Homo sapiens
CARDSFSIAVAGPGDYW

SEQ ID NO: 43987 - protein, 14 aa, Homo sapiens
CAKGRYGDYDFDHW

SEQ ID NO: 43988 - protein, 12 aa, Homo sapiens
CQSVDSSGNIKF

SEQ ID NO: 43989 - protein, 13 aa, Homo sapiens
CARYGSNLHLDYW

SEQ ID NO: 43990 - protein, 15 aa, Homo sapiens
CGTWDDSLSGPYWVF

SEQ ID NO: 43991 - protein, 17 aa, Homo sapiens
CVRVGSRYSTTGAFDYW

SEQ ID NO: 43992 - protein, 17 aa, Homo sapiens
CARPLFFGESTHAFNIW

SEQ ID NO: 43993 - protein, 17 aa, Homo sapiens
CVRHPLDIVSTNGFDIW

SEQ ID NO: 43994 - protein, 21 aa, Homo sapiens
CTKDFGPLEAVGTSRVAFDIW

SEQ ID NO: 43995 - protein, 20 aa, Homo sapiens
CARGPEYTGELRDVWTLDYW

SEQ ID NO: 43996 - protein, 22 aa, Homo sapiens
CAKDKSSGSLYPDQYYYYMDVW

SEQ ID NO: 43997 - protein, 18 aa, Homo sapiens
CARDLTSCGGDCYLFDYW

SEQ ID NO: 43998 - protein, 20 aa, Homo sapiens
CAKEPLEGYYGSGRYFFDYW

SEQ ID NO: 43999 - protein, 22 aa, Homo sapiens
CTTATEGRDYGGAYYDYYFDYW

SEQ ID NO: 44000 - protein, 19 aa, Homo sapiens
CAKDIGVLTMVPFAAFDIW

SEQ ID NO: 44001 - protein, 19 aa, Homo sapiens
CATRGGPQGAYYYQYMDVW

SEQ ID NO: 44002 - protein, 18 aa, Homo sapiens
CARVSGTRFIAAAEFDSW

SEQ ID NO: 44003 - protein, 19 aa, Homo sapiens
CAKDIVVVTAIPNWYFDLW

SEQ ID NO: 44004 - protein, 15 aa, Homo sapiens
CARYFGDYLEAFDVW

SEQ ID NO: 44005 - protein, 14 aa, Homo sapiens
CTKPSGVDDVFDLW

SEQ ID NO: 44006 - protein, 22 aa, Homo sapiens
CARERGYYDSSGYTQGYFFDFW

SEQ ID NO: 44007 - protein, 22 aa, Homo sapiens
CARVAYYYDTSSYSQFHYLDNW

SEQ ID NO: 44008 - protein, 19 aa, Homo sapiens
CARDLLGFLGSGLGAFDIW

SEQ ID NO: 44009 - protein, 16 aa, Homo sapiens
CARPPFSYQGAPFHYW

SEQ ID NO: 44010 - protein, 21 aa, Homo sapiens
CARGPTATSYDSSGYYPFDYW

SEQ ID NO: 44011 - protein, 17 aa, Homo sapiens
CARDSRSSGWRKEYDYW

SEQ ID NO: 44012 - protein, 18 aa, Homo sapiens
CTRDPDTRGYFQNSFDPW

SEQ ID NO: 44013 - protein, 20 aa, Homo sapiens
CSRYCSSTSCYDVDNWFDPW

SEQ ID NO: 44014 - protein, 19 aa, Homo sapiens
CAKDHSNYDFKRSWGFDYW

SEQ ID NO: 44015 - protein, 17 aa, Homo sapiens
CARVSLRYSYGHNFDYW

SEQ ID NO: 44016 - protein, 23 aa, Homo sapiens
CARGGTESSGYSLPGHSYYMDVW

SEQ ID NO: 44017 - protein, 21 aa, Homo sapiens
CAKASSYDILTAYSRYNFDSW

SEQ ID NO: 44018 - protein, 20 aa, Homo sapiens
CTRVYCGSGGCNGDWYFDLW

SEQ ID NO: 44019 - protein, 18 aa, Homo sapiens
CARHYAVVGGPGEGFDIW

SEQ ID NO: 44020 - protein, 22 aa, Homo sapiens
CARDVAEMAPTSPNYYFYMDVW

SEQ ID NO: 44021 - protein, 23 aa, Homo sapiens
CSSSTYYDLLTGRYRPPMLFDNW

SEQ ID NO: 44022 - protein, 24 aa, Homo sapiens
CARRGMNYYGSGSYYNWGDAFDIW

SEQ ID NO: 44023 - protein, 13 aa, Homo sapiens
CATPLTHIAFDVW

SEQ ID NO: 44024 - protein, 16 aa, Homo sapiens
CAKGRYGTGLYYFDFW

SEQ ID NO: 44025 - protein, 18 aa, Homo sapiens
CAHRLWDLTTLLSGFDHW

SEQ ID NO: 44026 - protein, 14 aa, Homo sapiens
CTRGTTMTTYADHW

SEQ ID NO: 44027 - protein, 16 aa, Homo sapiens
CARTKSGSYQTALDYW

SEQ ID NO: 44028 - protein, 24 aa, Homo sapiens
CARQPVLRYFDWSPTSSDWYFDLW

SEQ ID NO: 44029 - protein, 19 aa, Homo sapiens
CAISDTLRGVILNDAFDIW

SEQ ID NO: 44030 - protein, 18 aa, Homo sapiens
CTTGLWWGELRAHYFDFW

SEQ ID NO: 44031 - protein, 16 aa, Homo sapiens
CARQSYILTGDPFDYW

SEQ ID NO: 44032 - protein, 17 aa, Homo sapiens
CARENNYYDSSVCFDSW

SEQ ID NO: 44033 - protein, 23 aa, Homo sapiens
CARPRYYDSSGFYNFDTYAFDIW

SEQ ID NO: 44034 - protein, 19 aa, Homo sapiens
CARSYYYDTDTYSYYFDHW

SEQ ID NO: 44035 - protein, 17 aa, Homo sapiens
CARRRGTGYDNWYFDLW

SEQ ID NO: 44036 - protein, 19 aa, Homo sapiens
CATEKTHLYSASLGFFDLW

SEQ ID NO: 44037 - protein, 20 aa, Homo sapiens
CARGIYDPSGYSNDDAFDIW

SEQ ID NO: 44038 - protein, 20 aa, Homo sapiens
CARRPRYYYDTSGGYYFDSW

SEQ ID NO: 44039 - protein, 14 aa, Homo sapiens
CARTDILTGYCDCW

SEQ ID NO: 44040 - protein, 18 aa, Homo sapiens
CARRFFGQLHTPGYFDYW

SEQ ID NO: 44041 - protein, 16 aa, Homo sapiens
CARGIAAAGTCIFDSW

SEQ ID NO: 44042 - protein, 21 aa, Homo sapiens
CARRVTLGAIWGLRAGWFDYW

SEQ ID NO: 44043 - protein, 19 aa, Homo sapiens
CAKDDRRLVRGLMGYLDLW

SEQ ID NO: 44044 - protein, 19 aa, Homo sapiens
CAHSGSSSWFFGWNWFDPW

SEQ ID NO: 44045 - protein, 23 aa, Homo sapiens
CATLHITMVRGVIPLLGYYFDYW

SEQ ID NO: 44046 - protein, 17 aa, Homo sapiens
CAKDSYRYGSQSPFDFW

SEQ ID NO: 44047 - protein, 15 aa, Homo sapiens
CASSAYYYTYYFDNW

SEQ ID NO: 44048 - protein, 17 aa, Homo sapiens
CAKVSVEYIFEYYFDYW

SEQ ID NO: 44049 - protein, 17 aa, Homo sapiens
CARDRPSYGQYVGFNYW

SEQ ID NO: 44050 - protein, 22 aa, Homo sapiens
CARLDYYPSATSYNVSWAFDVW

SEQ ID NO: 44051 - protein, 18 aa, Homo sapiens
CARDLFDYSNFQNCFDPW

SEQ ID NO: 44052 - protein, 16 aa, Homo sapiens
CAKEVQNWAGHYFDFW

SEQ ID NO: 44053 - protein, 16 aa, Homo sapiens
CAWYYYDITGYYSDYW

SEQ ID NO: 44054 - protein, 14 aa, Homo sapiens
CARLAQIDYFFDFW

SEQ ID NO: 44055 - protein, 19 aa, Homo sapiens
CARGVADGYILYPVYFDYW

SEQ ID NO: 44056 - protein, 13 aa, Homo sapiens
CQQFKPYPLELAF

SEQ ID NO: 44057 - protein, 13 aa, Homo sapiens
CQQYNTYPRVVTF

SEQ ID NO: 44058 - protein, 15 aa, Homo sapiens
CATHLVGVNDAFDLW

SEQ ID NO: 44059 - protein, 20 aa, Homo sapiens
CAKDQMGSYAYNYYYYMDVW

SEQ ID NO: 44060 - protein, 24 aa, Homo sapiens
CARGQGFGQWLPGNSYYYYYMDVW

SEQ ID NO: 44061 - protein, 15 aa, Homo sapiens
CATRPLLSGYYFDYW

SEQ ID NO: 44062 - protein, 16 aa, Homo sapiens
CVKDLMRTVTTGLDYW

SEQ ID NO: 44063 - protein, 15 aa, Homo sapiens
CARALSWYQDAFDIW

SEQ ID NO: 44064 - protein, 17 aa, Homo sapiens
CARLGSIAVMTAPFDYW

SEQ ID NO: 44065 - protein, 18 aa, Homo sapiens
CAKDNYYGSGSQGYFHLW

SEQ ID NO: 44066 - protein, 14 aa, Homo sapiens
CAREGRNYWYLDLW

SEQ ID NO: 44067 - protein, 21 aa, Homo sapiens
CARRRHITIFGVVTSTGFDYW

SEQ ID NO: 44068 - protein, 19 aa, Homo sapiens
CARLRNRYDSSGYYSFDYW

SEQ ID NO: 44069 - protein, 13 aa, Homo sapiens
CQQRGHWPPGAFF

SEQ ID NO: 44070 - protein, 17 aa, Homo sapiens
CARDRSLNMMVDAFDIW

SEQ ID NO: 44071 - protein, 20 aa, Homo sapiens
CTTDSDDYGDYAGDSYFDYW

SEQ ID NO: 44072 - protein, 15 aa, Homo sapiens
CVRYPVMIFSGFDYW

SEQ ID NO: 44073 - protein, 16 aa, Homo sapiens
CAKDGQWLAFSSLDYW

SEQ ID NO: 44074 - protein, 14 aa, Homo sapiens
CARQRRRESYSDYW

SEQ ID NO: 44075 - protein, 15 aa, Homo sapiens
CAKDDGLVSAALDYW

SEQ ID NO: 44076 - protein, 17 aa, Homo sapiens
CARDGAYSGYENWFDPW

SEQ ID NO: 44077 - protein, 18 aa, Homo sapiens
CAASSTWSYFYYYYMDVW

SEQ ID NO: 44078 - protein, 19 aa, Homo sapiens
CARDDVISGNFYHNWFDPW

SEQ ID NO: 44079 - protein, 15 aa, Homo sapiens
CARAGDGYNWYFEHW

SEQ ID NO: 44080 - protein, 19 aa, Homo sapiens
CARAFGLDYHDSSHYEDSW

SEQ ID NO: 44081 - protein, 15 aa, Homo sapiens
CARLSYSNSYTFDYW

SEQ ID NO: 44082 - protein, 11 aa, Homo sapiens
CMQVLQTHGVF

SEQ ID NO: 44083 - protein, 17 aa, Homo sapiens
CARRGGGSGWSFFFAYW

SEQ ID NO: 44084 - protein, 14 aa, Homo sapiens
CASDLYGDPAFDYW

SEQ ID NO: 44085 - protein, 17 aa, Homo sapiens
CARGDPYVWVTHRLDYW

SEQ ID NO: 44086 - protein, 19 aa, Homo sapiens
CARDLFGGSGWAEGAFDIW

SEQ ID NO: 44087 - protein, 25 aa, Homo sapiens
CARTHIVQVPSFAARRNYYYYMDVW

SEQ ID NO: 44088 - protein, 19 aa, Homo sapiens
CAKDRPPSTYPGSGPFDYW

SEQ ID NO: 44089 - protein, 22 aa, Homo sapiens
CARKGGYCSGGSCYGVKVFDYW

SEQ ID NO: 44090 - protein, 24 aa, Homo sapiens
CASYPELPYCTPTGCNTLSWFDPW

SEQ ID NO: 44091 - protein, 21 aa, Homo sapiens
CAKDIPPAFSSSWYTGAFDIW

SEQ ID NO: 44092 - protein, 20 aa, Homo sapiens
CARALKFYGSGTNKYYFDYW

SEQ ID NO: 44093 - protein, 20 aa, Homo sapiens
CARRMYYNFWSGYYDWYDPW

SEQ ID NO: 44094 - protein, 18 aa, Homo sapiens
CARVHCIDGVCNNYMDVW

SEQ ID NO: 44095 - protein, 27 aa, Homo sapiens
CARHPITRFCTGGRCYSRKNNNWFDPW

SEQ ID NO: 44096 - protein, 18 aa, Homo sapiens
CARLNLDMVRGPYCFDSW

SEQ ID NO: 44097 - protein, 14 aa, Homo sapiens
CARHTGWELLLDYW

SEQ ID NO: 44098 - protein, 16 aa, Homo sapiens
CANGLVGILAAPFDSW

SEQ ID NO: 44099 - protein, 19 aa, Homo sapiens
CVRHDGREYYYGSGTYDYW

SEQ ID NO: 44100 - protein, 13 aa, Homo sapiens
CYSYAGSSTFELF

SEQ ID NO: 44101 - protein, 23 aa, Homo sapiens
CARMAGRDMILVVITGSYYFDYW

SEQ ID NO: 44102 - protein, 19 aa, Homo sapiens
CARLTWLLLRTYHYYIDVW

SEQ ID NO: 44103 - protein, 16 aa, Homo sapiens
CARDFSSTWTPWFDPW

SEQ ID NO: 44104 - protein, 15 aa, Homo sapiens
CTRGSGAAAGNFDYW

SEQ ID NO: 44105 - protein, 15 aa, Homo sapiens
CASATVATSTPFDYW

SEQ ID NO: 44106 - protein, 15 aa, Homo sapiens
CARLMGYDELLFDYW

SEQ ID NO: 44107 - protein, 21 aa, Homo sapiens
CAKVNHDILTGYYADNYFDNW

SEQ ID NO: 44108 - protein, 16 aa, Homo sapiens
CARDRGTMIGNSFDVW

SEQ ID NO: 44109 - protein, 18 aa, Homo sapiens
CAKPATAWGGFEDAIDSW

SEQ ID NO: 44110 - protein, 23 aa, Homo sapiens
CARGLLLDMEVIPPAMTDAFDVW

SEQ ID NO: 44111 - protein, 22 aa, Homo sapiens
CARDPPYCSGGSCYSPHNSDYW

SEQ ID NO: 44112 - protein, 17 aa, Homo sapiens
CAKVFGLGSVWSLFDHW

SEQ ID NO: 44113 - protein, 17 aa, Homo sapiens
CARVEIYGSGTRYFDFW

SEQ ID NO: 44114 - protein, 17 aa, Homo sapiens
CAREPIKLNWGSRDDYW

SEQ ID NO: 44115 - protein, 21 aa, Homo sapiens
CARDLDYDNGGYLFDAAFDIW

SEQ ID NO: 44116 - protein, 20 aa, Homo sapiens
CARAISYYYLGRGDMPFAYW

SEQ ID NO: 44117 - protein, 18 aa, Homo sapiens
CAREAETSGYDYWYSDLW

SEQ ID NO: 44118 - protein, 25 aa, Homo sapiens
CARDAHIAVETTTLGPPAPHWFDPW

SEQ ID NO: 44119 - protein, 14 aa, Homo sapiens
CARMLEDTGDFDYW

SEQ ID NO: 44120 - protein, 17 aa, Homo sapiens
CAREEIAYSGTWHFDYW

SEQ ID NO: 44121 - protein, 18 aa, Homo sapiens
CARQGPYYDILTGYEDVW

SEQ ID NO: 44122 - protein, 17 aa, Homo sapiens
CARDDSGGYHYLFFEYW

SEQ ID NO: 44123 - protein, 21 aa, Homo sapiens
CTRHRLYKWLLSDFFFYMDVW

SEQ ID NO: 44124 - protein, 24 aa, Homo sapiens
CARDFGTYYYDSSGYYYPNYFDYW

SEQ ID NO: 44125 - protein, 21 aa, Homo sapiens
CITESVNYYDTKDFLPPFAYW

SEQ ID NO: 44126 - protein, 22 aa, Homo sapiens
CSRVAMSRFDWALGGVQYFDFW

SEQ ID NO: 44127 - protein, 22 aa, Homo sapiens
CARDVEDHYDNNGYYGFYFDFW

SEQ ID NO: 44128 - protein, 19 aa, Homo sapiens
CARHEGVHYGILSGSLDYW

SEQ ID NO: 44129 - protein, 19 aa, Homo sapiens
CARPSYGGKRHYYYYMDVW

SEQ ID NO: 44130 - protein, 18 aa, Homo sapiens
CVRDSVFQNYYDSGLDYW

SEQ ID NO: 44131 - protein, 16 aa, Homo sapiens
CARVIGTLYSEYFDYW

SEQ ID NO: 44132 - protein, 16 aa, Homo sapiens
CARRGGSYYSHRFDPW

SEQ ID NO: 44133 - protein, 13 aa, Homo sapiens
CTKAAGADVFDMW

SEQ ID NO: 44134 - protein, 19 aa, Homo sapiens
CAREGKFGVNYFYFYMDVW

SEQ ID NO: 44135 - protein, 13 aa, Homo sapiens
CAGMGELSLLDYW

SEQ ID NO: 44136 - protein, 19 aa, Homo sapiens
CAREAPGRQWLVRAYFDYW

SEQ ID NO: 44137 - protein, 17 aa, Homo sapiens
CARDSLFYDLEGTFDLW

SEQ ID NO: 44138 - protein, 24 aa, Homo sapiens
CVRAELDAEITVLRGVTQYYFDYW

SEQ ID NO: 44139 - protein, 18 aa, Homo sapiens
CARDLGPIVTPPRGFDYW

SEQ ID NO: 44140 - protein, 15 aa, Homo sapiens
CAKDRVAAAGPGDYW

SEQ ID NO: 44141 - protein, 16 aa, Homo sapiens
CARDFSVFGELFPDYW

SEQ ID NO: 44142 - protein, 19 aa, Homo sapiens
CAQSPDFGGYRRYYYMDVW

SEQ ID NO: 44143 - protein, 23 aa, Homo sapiens
CARHRKQQLVSRRHYYYYYMDVW

SEQ ID NO: 44144 - protein, 20 aa, Homo sapiens
CAREKTVVVTGIPIYYMDVW

SEQ ID NO: 44145 - protein, 22 aa, Homo sapiens
CARDSGYYDTGNYYTANWFDPW

SEQ ID NO: 44146 - protein, 18 aa, Homo sapiens
CARSQRAIFDSGNWFDPW

SEQ ID NO: 44147 - protein, 24 aa, Homo sapiens
CARLSYGLLPGDLADPYYYYMDVW

SEQ ID NO: 44148 - protein, 21 aa, Homo sapiens
CARSDHGYSYGNYYYYYMDAW

SEQ ID NO: 44149 - protein, 19 aa, Homo sapiens
CARLPPRGRSWYEDAFDIW

SEQ ID NO: 44150 - protein, 19 aa, Homo sapiens
CARDHRFLGMVRGVNLDYW

SEQ ID NO: 44151 - protein, 14 aa, Homo sapiens
CAGALRDLFAWDYW

SEQ ID NO: 44152 - protein, 23 aa, Homo sapiens
CARAPPYSSSWGSKRRFYYFDYW

SEQ ID NO: 44153 - protein, 21 aa, Homo sapiens
CAKDSDYDILTGYYSEYFHLW

SEQ ID NO: 44154 - protein, 17 aa, Homo sapiens
CAHRTSSGYYSKSFDFW

SEQ ID NO: 44155 - protein, 18 aa, Homo sapiens
CARDYCSDGSCHTVFDNW

SEQ ID NO: 44156 - protein, 23 aa, Homo sapiens
CAKDIVIYYDSSGQGGVDAFDVW

SEQ ID NO: 44157 - protein, 19 aa, Homo sapiens
CAKDLKVSIYYYYYYMDVW

SEQ ID NO: 44158 - protein, 21 aa, Homo sapiens
CARLGRSVATKAGPYHWFDPW

SEQ ID NO: 44159 - protein, 21 aa, Homo sapiens
CARDPGPVWSGYYRPGWYDPW

SEQ ID NO: 44160 - protein, 16 aa, Homo sapiens
CAMTLAVTYPYYFENW

SEQ ID NO: 44161 - protein, 14 aa, Homo sapiens
CATGRISWHAHDYW

SEQ ID NO: 44162 - protein, 19 aa, Homo sapiens
CAKAREATIFGMVTPSDYW

SEQ ID NO: 44163 - protein, 15 aa, Homo sapiens
CANLVVAYREYFQHW

SEQ ID NO: 44164 - protein, 22 aa, Homo sapiens
CATDPTRYCRGYDCRIGPFDYW

SEQ ID NO: 44165 - protein, 17 aa, Homo sapiens
CARHYSRDGHFYYFDYW

SEQ ID NO: 44166 - protein, 14 aa, Homo sapiens
CSSYTYSSALDVVF

SEQ ID NO: 44167 - protein, 17 aa, Homo sapiens
CVRDQGSLTAHMYFDYW

SEQ ID NO: 44168 - protein, 20 aa, Homo sapiens
CARGYDSTAYYYLDDAFDIW

SEQ ID NO: 44169 - protein, 15 aa, Homo sapiens
CAKDFGSNTSPFDAW

SEQ ID NO: 44170 - protein, 19 aa, Homo sapiens
CARDYYDTGAYYLGSFDYW

SEQ ID NO: 44171 - protein, 22 aa, Homo sapiens
CARVAYYYDRSGYQTATYFQHW

SEQ ID NO: 44172 - protein, 16 aa, Homo sapiens
CATLTYYFDTTGFDYW

SEQ ID NO: 44173 - protein, 20 aa, Homo sapiens
CAKVTGWREFIAAAAPFDYW

SEQ ID NO: 44174 - protein, 21 aa, Homo sapiens
CARDRPTPWHQLPSVNGLDPW

SEQ ID NO: 44175 - protein, 17 aa, Homo sapiens
CARSMCFCGSGTSSDYW

SEQ ID NO: 44176 - protein, 24 aa, Homo sapiens
CARAGYEGRSYDSSGYLYWYFDPW

SEQ ID NO: 44177 - protein, 21 aa, Homo sapiens
CARGRREYCSVSNCPNWFDPW

SEQ ID NO: 44178 - protein, 15 aa, Homo sapiens
CARVAEYSSGPFDYW

SEQ ID NO: 44179 - protein, 21 aa, Homo sapiens
CARDVTNYYDSSGSSSGFDYW

SEQ ID NO: 44180 - protein, 19 aa, Homo sapiens
CARERNDNSGYYSGYFDYW

SEQ ID NO: 44181 - protein, 21 aa, Homo sapiens
CAKRDDYVWGTYRSDLAFDYW

SEQ ID NO: 44182 - protein, 17 aa, Homo sapiens
CARSLYHVLTGSYFDSW

SEQ ID NO: 44183 - protein, 18 aa, Homo sapiens
CAHSPLWWFGGVHAFDIW

SEQ ID NO: 44184 - protein, 21 aa, Homo sapiens
CATSFYQIDSGGYYAGAADIW

SEQ ID NO: 44185 - protein, 19 aa, Homo sapiens
CVKVDDAYGLGRYGAFDYW

SEQ ID NO: 44186 - protein, 16 aa, Homo sapiens
CARDYSGYQTREMDYW

SEQ ID NO: 44187 - protein, 17 aa, Homo sapiens
CGKDIEQTYGGDAFDLW

SEQ ID NO: 44188 - protein, 13 aa, Homo sapiens
CAKEEQYDSIDYW

SEQ ID NO: 44189 - protein, 16 aa, Homo sapiens
CARDNYYENHGPIDYW

SEQ ID NO: 44190 - protein, 21 aa, Homo sapiens
CAKDIYDNRISYYGFPGLDYW

SEQ ID NO: 44191 - protein, 16 aa, Homo sapiens
CARYRDGDTHDAFDIW

SEQ ID NO: 44192 - protein, 20 aa, Homo sapiens
CARHFLGADIIAVAAPFDYW

SEQ ID NO: 44193 - protein, 21 aa, Homo sapiens
CARIERDRISGTTSGNWFDPW

SEQ ID NO: 44194 - protein, 23 aa, Homo sapiens
CAKDSRLVRGGRIQTYREYFQHW

SEQ ID NO: 44195 - protein, 22 aa, Homo sapiens
CARNTLNYDILLEDRPSYFDPW

SEQ ID NO: 44196 - protein, 28 aa, Homo sapiens
CARDVSLNPGYGNTWYSNYYYYSYMDVW

SEQ ID NO: 44197 - protein, 19 aa, Homo sapiens
CARARSGYCTSTTCYLHYW

SEQ ID NO: 44198 - protein, 15 aa, Homo sapiens
CQVWDSNTGHQGYVF

SEQ ID NO: 44199 - protein, 16 aa, Homo sapiens
CARVIEPWALSSFDPW

SEQ ID NO: 44200 - protein, 17 aa, Homo sapiens
CAKSPGSGYSIRYLDLW

SEQ ID NO: 44201 - protein, 15 aa, Homo sapiens
CARFLRQLVDSFDVW

SEQ ID NO: 44202 - protein, 18 aa, Homo sapiens
CARDGWTEGYYFYYMDVW

SEQ ID NO: 44203 - protein, 19 aa, Homo sapiens
CAKGKEPQLAIKTWYFDYW

SEQ ID NO: 44204 - protein, 17 aa, Homo sapiens
CVKGSDRGSPPAYFDSW

SEQ ID NO: 44205 - protein, 21 aa, Homo sapiens
CARGPKFSSSWSNAQFFFDTW

SEQ ID NO: 44206 - protein, 13 aa, Homo sapiens
CARVRQQLAYDYW

SEQ ID NO: 44207 - protein, 15 aa, Homo sapiens
CARSDTGSYVRADYW

SEQ ID NO: 44208 - protein, 17 aa, Homo sapiens
CVRDMSMAVIAPPFDYW

SEQ ID NO: 44209 - protein, 14 aa, Homo sapiens
CARLRSLEHTFDIW

SEQ ID NO: 44210 - protein, 16 aa, Homo sapiens
CVSEADIHDYVHFDYW

SEQ ID NO: 44211 - protein, 13 aa, Homo sapiens
CARGPTRYYFDSW

SEQ ID NO: 44212 - protein, 22 aa, Homo sapiens
CVKAPVLMWFGESTRDLYFQFW

SEQ ID NO: 44213 - protein, 16 aa, Homo sapiens
CARGRTYGGDTWFDTW

SEQ ID NO: 44214 - protein, 16 aa, Homo sapiens
CARDLIRAPRGYLDVW

SEQ ID NO: 44215 - protein, 12 aa, Homo sapiens
CQQVHSYPPFSF

SEQ ID NO: 44216 - protein, 21 aa, Homo sapiens
CARRAYNCEVGGYCYYYIDVW

SEQ ID NO: 44217 - protein, 23 aa, Homo sapiens
CAKELTYYYDGSGYYGPDRLDYW

SEQ ID NO: 44218 - protein, 19 aa, Homo sapiens
CARHLHLFMAVAGTPFDSW

SEQ ID NO: 44219 - protein, 17 aa, Homo sapiens
CARDPGEAPRGYYFDHW

SEQ ID NO: 44220 - protein, 20 aa, Homo sapiens
CARGQNPLGSYSSSWLFDYW

SEQ ID NO: 44221 - protein, 19 aa, Homo sapiens
CARTSYDSSGYYPGDFDYW

SEQ ID NO: 44222 - protein, 19 aa, Homo sapiens
CARDLRVYNWNDVEGLDYW

SEQ ID NO: 44223 - protein, 17 aa, Homo sapiens
CATPSLLQLERPDFDHW

SEQ ID NO: 44224 - protein, 16 aa, Homo sapiens
CAKGYTGYHYSAFDIW

SEQ ID NO: 44225 - protein, 29 aa, Homo sapiens
CASVSRITMVRGVIKTTGADHKDNWFDPW

SEQ ID NO: 44226 - protein, 15 aa, Homo sapiens
CVRSPTIVARHFDYW

SEQ ID NO: 44227 - protein, 20 aa, Homo sapiens
CATYSYDSSRALTTYFFDSW

SEQ ID NO: 44228 - protein, 16 aa, Homo sapiens [sequence omitted]

SEQ ID NO: 44229 - protein, 19 aa, Homo sapiens
CARSHYYATSGHPYYFDYW

SEQ ID NO: 44230 - protein, 21 aa, Homo sapiens
CAHGTDDYYDSSGYYAWFDYW

SEQ ID NO: 44231 - protein, 15 aa, Homo sapiens
CASGLSLTVDAFDIW

SEQ ID NO: 44232 - protein, 22 aa, Homo sapiens
CARGVFYYGSGTIGTHVPFDIW

SEQ ID NO: 44233 - protein, 20 aa, Homo sapiens
CARFHYYDTTGFYHDAFDIW

SEQ ID NO: 44234 - protein, 19 aa, Homo sapiens
CAKVWDSGSASYNDAFHIW

SEQ ID NO: 44235 - protein, 21 aa, Homo sapiens
CARGWRHCSGVSCSGNPIDYW

SEQ ID NO: 44236 - protein, 16 aa, Homo sapiens
CTRGGQSGYDWGFDYW

SEQ ID NO: 44237 - protein, 18 aa, Homo sapiens
CASGPIKYSSGLTYFDFW

SEQ ID NO: 44238 - protein, 19 aa, Homo sapiens
CVRDIGLGPYTPQYYFDYW

SEQ ID NO: 44239 - protein, 18 aa, Homo sapiens
CAKWVGAEGSGWYYFDSW

SEQ ID NO: 44240 - protein, 25 aa, Homo sapiens
CARSHISMVPGVILSDHHYYYMDVW

SEQ ID NO: 44241 - protein, 22 aa, Homo sapiens
CARVGAYREIIVVPAAMPADYW

SEQ ID NO: 44242 - protein, 18 aa, Homo sapiens
CARHGDIEVVTGDAFDVW

SEQ ID NO: 44243 - protein, 17 aa, Homo sapiens
CARKPLWFADYGGFDSW

SEQ ID NO: 44244 - protein, 17 aa, Homo sapiens
CAKAAGGTTKPLHFDYW

SEQ ID NO: 44245 - protein, 20 aa, Homo sapiens
CAKDIASRLGELSLLSFDCW

SEQ ID NO: 44246 - protein, 19 aa, Homo sapiens
CARDGSRDYYDRSDGIDVW

SEQ ID NO: 44247 - protein, 16 aa, Homo sapiens
CARGMIVATIGAFDYW

SEQ ID NO: 44248 - protein, 13 aa, Homo sapiens
CARFGHTRYFDFW

SEQ ID NO: 44249 - protein, 22 aa, Homo sapiens
CARYPYGSAGSYNKVENYMDVW

SEQ ID NO: 44250 - protein, 14 aa, Homo sapiens
CASEDYGDFHFDSW

SEQ ID NO: 44251 - protein, 24 aa, Homo sapiens
CARHVGDTIVRDFITYYYYYMDVW

SEQ ID NO: 44252 - protein, 22 aa, Homo sapiens
CVKDGSLHCNYITCSSSGFDSW

SEQ ID NO: 44253 - protein, 14 aa, Homo sapiens
CARDVVVASYFDYW

SEQ ID NO: 44254 - protein, 17 aa, Homo sapiens
CAGSVSDYYLSYAFDIW

SEQ ID NO: 44255 - protein, 21 aa, Homo sapiens
CAKDGRDVLTGHYVKYYFVSW

SEQ ID NO: 44256 - protein, 19 aa, Homo sapiens
CARGRRGMYWNDFSGFDYW

SEQ ID NO: 44257 - protein, 15 aa, Homo sapiens
CARALYFDSSSFQYW

SEQ ID NO: 44258 - protein, 19 aa, Homo sapiens
CAKCPSSSCYGGGWYFDLW

SEQ ID NO: 44259 - protein, 17 aa, Homo sapiens
CVKNIGSQLGSDAFDIW

SEQ ID NO: 44260 - protein, 19 aa, Homo sapiens
CARHHRTTVLTPDSAFDIW

SEQ ID NO: 44261 - protein, 15 aa, Homo sapiens
CARLGIEVAHWFDPW

SEQ ID NO: 44262 - protein, 22 aa, Homo sapiens
CVKVGYAFCGGDCYSPYLNDYW

SEQ ID NO: 44263 - protein, 15 aa, Homo sapiens
CAKDDILSKDAFGLW

SEQ ID NO: 44264 - protein, 19 aa, Homo sapiens
CTIDIVTVEIRAGLGFDPW

SEQ ID NO: 44265 - protein, 10 aa, Homo sapiens
CANAYEQDYW

SEQ ID NO: 44266 - protein, 20 aa, Homo sapiens
CASGGDYFRLGTYSWYFELW

SEQ ID NO: 44267 - protein, 20 aa, Homo sapiens
CARARYDILTGYHDPDFDYW

SEQ ID NO: 44268 - protein, 18 aa, Homo sapiens
CAKVGGYTYGTDDALDVW

SEQ ID NO: 44269 - protein, 19 aa, Homo sapiens
CARDVTIVRGVTLTYFDSW

SEQ ID NO: 44270 - protein, 17 aa, Homo sapiens
CVKGSDIAAAGTDFDYW

SEQ ID NO: 44271 - protein, 19 aa, Homo sapiens
CARHGGVLWFGELGGLDYW

SEQ ID NO: 44272 - protein, 16 aa, Homo sapiens
CAKDLWMSDYYYMDVW

SEQ ID NO: 44273 - protein, 17 aa, Homo sapiens
CARDSLYGSGSYSFDYW

SEQ ID NO: 44274 - protein, 12 aa, Homo sapiens
CSRRAMGATDYW

SEQ ID NO: 44275 - protein, 16 aa, Homo sapiens
CARDGIPGGNYYFNYW

SEQ ID NO: 44276 - protein, 16 aa, Homo sapiens
CAKRSGYSYVNWFDPW

SEQ ID NO: 44277 - protein, 16 aa, Homo sapiens
CARDYSGSHLGPFDFW

SEQ ID NO: 44278 - protein, 18 aa, Homo sapiens
CARGPHYYHGGGYYADYW

SEQ ID NO: 44279 - protein, 23 aa, Homo sapiens
CARPSIITFFGVMTRWMNAFDIW

SEQ ID NO: 44280 - protein, 17 aa, Homo sapiens
CARTRITMVRGVVFDPW

SEQ ID NO: 44281 - protein, 18 aa, Homo sapiens
CASALAAAGSSFWYFDLW

SEQ ID NO: 44282 - protein, 23 aa, Homo sapiens
CAKNGGYSGHDLVSYYYYFMDVW

SEQ ID NO: 44283 - protein, 17 aa, Homo sapiens
CVKDMGVTNPMYYFDFW

SEQ ID NO: 44284 - protein, 19 aa, Homo sapiens
CTTRPSYYDTLTGYYPDYW

SEQ ID NO: 44285 - protein, 15 aa, Homo sapiens
CARADYQWDYAFDIW

SEQ ID NO: 44286 - protein, 15 aa, Homo sapiens
CARDSWGIAAAADYW

SEQ ID NO: 44287 - protein, 16 aa, Homo sapiens
CARVNMETAGDPIDYW

SEQ ID NO: 44288 - protein, 15 aa, Homo sapiens
CARDNIAAVGYFDAW

SEQ ID NO: 44289 - protein, 13 aa, Homo sapiens
CARDPSTFDLDYW

SEQ ID NO: 44290 - protein, 17 aa, Homo sapiens
CAKDWGQGAYYYYMDVW

SEQ ID NO: 44291 - protein, 20 aa, Homo sapiens
CARDRSTVTLLYYNYYMDVW

SEQ ID NO: 44292 - protein, 15 aa, Homo sapiens
CAHRKWEWLDHFDYW

SEQ ID NO: 44293 - protein, 15 aa, Homo sapiens
CARRILTSYTYFDFW

SEQ ID NO: 44294 - protein, 19 aa, Homo sapiens
CARGLSRELFLPQYYFDYW

SEQ ID NO: 44295 - protein, 17 aa, Homo sapiens
CAREDYKNPGIYFFDYW

SEQ ID NO: 44296 - protein, 17 aa, Homo sapiens
CARPQTVVRESDGFDIW

SEQ ID NO: 44297 - protein, 20 aa, Homo sapiens
CARDGPYFYDIGGFYYPDYW

SEQ ID NO: 44298 - protein, 20 aa, Homo sapiens
CAKDPLYYYDSSADTPEDYW

SEQ ID NO: 44299 - protein, 17 aa, Homo sapiens
CARVLSPRQWIYYFDYW

SEQ ID NO: 44300 - protein, 16 aa, Homo sapiens
CARGRATWEGDYFDHW

SEQ ID NO: 44301 - protein, 23 aa, Homo sapiens
CARVWYDILTGYYIARNDAFDIW

SEQ ID NO: 44302 - protein, 16 aa, Homo sapiens
CACSSRDGYTAYFDYW

SEQ ID NO: 44303 - protein, 17 aa, Homo sapiens
CARDQPYDYFWGSLDYW

SEQ ID NO: 44304 - protein, 16 aa, Homo sapiens
CARQGRDVGSEFFDYW

SEQ ID NO: 44305 - protein, 16 aa, Homo sapiens
CARHREVGADAAFDVW

SEQ ID NO: 44306 - protein, 18 aa, Homo sapiens
CAKDAHLAGGSGTYFDYW

SEQ ID NO: 44307 - protein, 12 aa, Homo sapiens
CARDFPLLRDYW

SEQ ID NO: 44308 - protein, 19 aa, Homo sapiens
CARLGSQHWLSLRAWFDPW

SEQ ID NO: 44309 - protein, 20 aa, Homo sapiens
CARLAGYSFGLYRPYYFDYW

SEQ ID NO: 44310 - protein, 25 aa, Homo sapiens
CAKVPGFFVVVLADSRPPSNWFDTW

SEQ ID NO: 44311 - protein, 19 aa, Homo sapiens
CARLTVSTSHYYYSYMDVW

SEQ ID NO: 44312 - protein, 19 aa, Homo sapiens
CARLNSRDDGLAAAGADYW

SEQ ID NO: 44313 - protein, 22 aa, Homo sapiens
CARTHPLTIAGRRDLSNFFDYW

SEQ ID NO: 44314 - protein, 19 aa, Homo sapiens
CAKTYWDRVGGAWNYFDHW

SEQ ID NO: 44315 - protein, 14 aa, Homo sapiens
CARRIAAGKKFDPW

SEQ ID NO: 44316 - protein, 17 aa, Homo sapiens
CAKSSLAPYYIRYSDNW

SEQ ID NO: 44317 - protein, 16 aa, Homo sapiens
CAREGITVEQWLVDYW

SEQ ID NO: 44318 - protein, 22 aa, Homo sapiens
CARSPSTVYDTAGYYGRTFDSW

SEQ ID NO: 44319 - protein, 12 aa, Homo sapiens
CTTGRFDAFGFW

SEQ ID NO: 44320 - protein, 14 aa, Homo sapiens
CAKDRRFGYYMDAW

SEQ ID NO: 44321 - protein, 17 aa, Homo sapiens
CVKTMGYYYDSTLIDYW

SEQ ID NO: 44322 - protein, 13 aa, Homo sapiens
CARRGAWYMIDYW

SEQ ID NO: 44323 - protein, 19 aa, Homo sapiens
CARGVAVDGVVLYNYFDPW

SEQ ID NO: 44324 - protein, 16 aa, Homo sapiens
CARHTFFYGGNDFDLW

SEQ ID NO: 44325 - protein, 17 aa, Homo sapiens
CAKVSGGYSSWDGFDYW

SEQ ID NO: 44326 - protein, 20 aa, Homo sapiens
CAKEPQPRTRYYYYYYMDVW

SEQ ID NO: 44327 - protein, 22 aa, Homo sapiens
CAKYGYYDILTGYSYYYYMDVW

SEQ ID NO: 44328 - protein, 18 aa, Homo sapiens
CASLAAFREWGGYYMDVW

SEQ ID NO: 44329 - protein, 16 aa, Homo sapiens
CTRSAKVTPYNWFDPW

SEQ ID NO: 44330 - protein, 16 aa, Homo sapiens
CVRDIGSNWYFGFDNW

SEQ ID NO: 44331 - protein, 13 aa, Homo sapiens
CARAGGVRTFDYW

SEQ ID NO: 44332 - protein, 24 aa, Homo sapiens
CARLKWGPSVGARRGSHYFYMDVW

SEQ ID NO: 44333 - protein, 20 aa, Homo sapiens
CAHYYDSRGHYYLVDWFDSW

SEQ ID NO: 44334 - protein, 16 aa, Homo sapiens
CATHITGTTDDGFDIW

SEQ ID NO: 44335 - protein, 18 aa, Homo sapiens
CAREVGGARPGGNWFDPW

SEQ ID NO: 44336 - protein, 20 aa, Homo sapiens
CAKLGAGSAYCGGDCFFDHW

SEQ ID NO: 44337 - protein, 13 aa, Homo sapiens
CQVWVSSVDHVIF

SEQ ID NO: 44338 - protein, 14 aa, Homo sapiens
CQVLDSSSDPLCVF

SEQ ID NO: 44339 - protein, 13 aa, Homo sapiens
CQQRTSWPPELAF

SEQ ID NO: 44340 - protein, 18 aa, Homo sapiens
CAKGSKGWLSYSGFFDSW

SEQ ID NO: 44341 - protein, 24 aa, Homo sapiens
CTTDRYCSSTSCQVGYYYYYMDVW

SEQ ID NO: 44342 - protein, 17 aa, Homo sapiens
CAKGTHSGSYRLPFDAW

SEQ ID NO: 44343 - protein, 19 aa, Homo sapiens
CARHHFDTWTGHLYYFDNW

SEQ ID NO: 44344 - protein, 19 aa, Homo sapiens
CARISATTLWFGESGFDFW

SEQ ID NO: 44345 - protein, 17 aa, Homo sapiens
CARERVVEQQVVLFDYW

SEQ ID NO: 44346 - protein, 21 aa, Homo sapiens
CARVWYIGSYRENRLDAFDIW

SEQ ID NO: 44347 - protein, 18 aa, Homo sapiens
CASLMGYREYSGSHVDYW

SEQ ID NO: 44348 - protein, 16 aa, Homo sapiens
CARGYSGSSYGRLDYW

SEQ ID NO: 44349 - protein, 17 aa, Homo sapiens
CASPAIPAAIDDAFDIW

SEQ ID NO: 44350 - protein, 21 aa, Homo sapiens
CARSPTIVSYRELQGDWFDPW

SEQ ID NO: 44351 - protein, 17 aa, Homo sapiens
CARVAGLAVAPNWFDPW

SEQ ID NO: 44352 - protein, 25 aa, Homo sapiens
CARSPSTMVRGTRSDYFYYYYMDVW

SEQ ID NO: 44353 - protein, 19 aa, Homo sapiens
CARGYRFYGSNTGYCFDYW

SEQ ID NO: 44354 - protein, 16 aa, Homo sapiens
CARGRRPYEIGRIDYW

SEQ ID NO: 44355 - protein, 14 aa, Homo sapiens
CAGGQGVGATVDYW

SEQ ID NO: 44356 - protein, 16 aa, Homo sapiens
CARVPFSWNDGAFDIW

SEQ ID NO: 44357 - protein, 19 aa, Homo sapiens
CARTPGRSSTSRINWFDPW

SEQ ID NO: 44358 - protein, 19 aa, Homo sapiens
CAKYQYSSNWYTGAFFDNW

SEQ ID NO: 44359 - protein, 19 aa, Homo sapiens
CAAVTYYYDSSGHNWFDPW

SEQ ID NO: 44360 - protein, 19 aa, Homo sapiens
CARGGRETELQVDYYFDSW

SEQ ID NO: 44361 - protein, 19 aa, Homo sapiens
CARLLRLGELSSVDAFDLW

SEQ ID NO: 44362 - protein, 20 aa, Homo sapiens
CARRLNLLRGVIPIWYFDIW

SEQ ID NO: 44363 - protein, 15 aa, Homo sapiens
CARALGFSGYAADYW

SEQ ID NO: 44364 - protein, 24 aa, Homo sapiens
CARRPGGAEDSLKSQRHFYYMDVW

SEQ ID NO: 44365 - protein, 20 aa, Homo sapiens
CAREPRERYSGSDSHWFDPW

SEQ ID NO: 44366 - protein, 20 aa, Homo sapiens
CARARGLLGISGGGTDFDYW

SEQ ID NO: 44367 - protein, 16 aa, Homo sapiens
CAKGSGVGALGSFNYW

SEQ ID NO: 44368 - protein, 27 aa, Homo sapiens
CARAAITFGGVIVITDRRDYYYYMDVW

SEQ ID NO: 44369 - protein, 19 aa, Homo sapiens
CARAALYFDWSYTSYFDFW

SEQ ID NO: 44370 - protein, 18 aa, Homo sapiens
CARQGGSSWFVQSWFDPW

SEQ ID NO: 44371 - protein, 11 aa, Homo sapiens
CTTDRPLGDYW

SEQ ID NO: 44372 - protein, 17 aa, Homo sapiens
CARLVVATIGGYYFDLW

SEQ ID NO: 44373 - protein, 22 aa, Homo sapiens
CARHGSHKGSYYGYYAYYMDVW

SEQ ID NO: 44374 - protein, 20 aa, Homo sapiens
CARGSSTQILYYYYYYMDVW

SEQ ID NO: 44375 - protein, 21 aa, Homo sapiens
CARARDDYVWGSYPQQYFQSW

SEQ ID NO: 44376 - protein, 16 aa, Homo sapiens
CATGGVYGEYGNFDFW

SEQ ID NO: 44377 - protein, 24 aa, Homo sapiens
CARDLKEYYDVLTGLGAPDPSDYW

SEQ ID NO: 44378 - protein, 26 aa, Homo sapiens
CAKPNTAGTSFDSDGYRIVTNYFDPW

SEQ ID NO: 44379 - protein, 12 aa, Homo sapiens
CARADLDHFDYW

SEQ ID NO: 44380 - protein, 18 aa, Homo sapiens
CARDLTRGYSGSRAFDIW

SEQ ID NO: 44381 - protein, 18 aa, Homo sapiens
CARDGEQWLSGTDGFDIW

SEQ ID NO: 44382 - protein, 18 aa, Homo sapiens
CARGRAAWELFPYYFDSW

SEQ ID NO: 44383 - protein, 16 aa, Homo sapiens
CAKDSHTLRLGELDYW

SEQ ID NO: 44384 - protein, 24 aa, Homo sapiens
CARLSAPIVVVPAALFDRYYMDVW

SEQ ID NO: 44385 - protein, 15 aa, Homo sapiens
CAKPQFLKWSAFDSW

SEQ ID NO: 44386 - protein, 15 aa, Homo sapiens
CARDEAATVTTFDYW

SEQ ID NO: 44387 - protein, 14 aa, Homo sapiens
CNSRDTSANHFYVF

SEQ ID NO: 44388 - protein, 24 aa, Homo sapiens
CARESRSGTYYYDDSGYDDGFDIW

SEQ ID NO: 44389 - protein, 20 aa, Homo sapiens
CARAAGSTNPSYFYYYMDVW

SEQ ID NO: 44390 - protein, 12 aa, Homo sapiens
CGRSRSNWLDHW

SEQ ID NO: 44391 - protein, 19 aa, Homo sapiens
CARGAGSTSVTISNWFDPW

SEQ ID NO: 44392 - protein, 17 aa, Homo sapiens
CAKDADSGSYQSYFDYW

SEQ ID NO: 44393 - protein, 19 aa, Homo sapiens
CARHIFDGPPPPQLAFDFW

SEQ ID NO: 44394 - protein, 15 aa, Homo sapiens
CARNIGTYLVHFDSW

SEQ ID NO: 44395 - protein, 15 aa, Homo sapiens
CASTWSTYYPAFDSW

SEQ ID NO: 44396 - protein, 20 aa, Homo sapiens
CARGTKQWLTLYYYYYMDVW

SEQ ID NO: 44397 - protein, 15 aa, Homo sapiens
CAKDADTGYYYAEYW

SEQ ID NO: 44398 - protein, 16 aa, Homo sapiens
CAKDYFPDSSGYDDYW

SEQ ID NO: 44399 - protein, 18 aa, Homo sapiens
CVRDQGSGHYYSDAFDVW

SEQ ID NO: 44400 - protein, 23 aa, Homo sapiens
CVREFNYDRSGGMHYQYYYIDVW

SEQ ID NO: 44401 - protein, 23 aa, Homo sapiens
CAKDLLRCSAASCPPNTDAFHIW

SEQ ID NO: 44402 - protein, 23 aa, Homo sapiens
CAKVGGYREYQLLPQILPRLDYW

SEQ ID NO: 44403 - protein, 19 aa, Homo sapiens
CARMVPYYHDSSGYYFDYW

SEQ ID NO: 44404 - protein, 19 aa, Homo sapiens
CARDGDTEMFAMFGWIDSW

SEQ ID NO: 44405 - protein, 20 aa, Homo sapiens
CARGGAYYYDSSGYTPFDYW

SEQ ID NO: 44406 - protein, 17 aa, Homo sapiens
CARPRSESSGYHAFDIW

SEQ ID NO: 44407 - protein, 10 aa, Homo sapiens
CLQAAQDPTF

SEQ ID NO: 44408 - protein, 22 aa, Homo sapiens
CAKAYCGVDCRNPYYYYYMDVW

SEQ ID NO: 44409 - protein, 23 aa, Homo sapiens
CATMRHSGYDIWDRPEALQFDSW

SEQ ID NO: 44410 - protein, 15 aa, Homo sapiens
CARYRGAASEANDYW

SEQ ID NO: 44411 - protein, 16 aa, Homo sapiens
CAKDKYSSSSFWFDPW

SEQ ID NO: 44412 - protein, 22 aa, Homo sapiens
CARADADPGYSSGWFPNYFDHW

SEQ ID NO: 44413 - protein, 23 aa, Homo sapiens
CARVGPIDLLVPSAVWDWYFDLW

SEQ ID NO: 44414 - protein, 17 aa, Homo sapiens
CAAGGNNYDSSGYFYYW

SEQ ID NO: 44415 - protein, 17 aa, Homo sapiens
CARGIRGEVAAIYFDHW

SEQ ID NO: 44416 - protein, 17 aa, Homo sapiens
CARDVAAAGKGGWFDPW

SEQ ID NO: 44417 - protein, 19 aa, Homo sapiens
CAKGAYHDSSGYRNWFGPW

SEQ ID NO: 44418 - protein, 16 aa, Homo sapiens
CVKAFTSGWYRTFEYW

SEQ ID NO: 44419 - protein, 16 aa, Homo sapiens
CVRDWSSNWYTRGDYW

SEQ ID NO: 44420 - protein, 18 aa, Homo sapiens
CARVGISGXVGVXYMDVW

SEQ ID NO: 44421 - protein, 16 aa, Homo sapiens
CARDRGGYSYGRFDHW

SEQ ID NO: 44422 - protein, 23 aa, Homo sapiens
CARPALSSWREWSAAGPYYFDYW

SEQ ID NO: 44423 - protein, 16 aa, Homo sapiens
CARGRRAPLPYYFDYW

SEQ ID NO: 44424 - protein, 15 aa, Homo sapiens
CAKDRKAIPYYFDYW

SEQ ID NO: 44425 - protein, 24 aa, Homo sapiens
CARHSPAGNNFGLPFYYYYYMDVW

SEQ ID NO: 44426 - protein, 18 aa, Homo sapiens
CARRYGGSGSYYRTFDYW

SEQ ID NO: 44427 - protein, 16 aa, Homo sapiens
CARDLREAATDAFDLW

SEQ ID NO: 44428 - protein, 22 aa, Homo sapiens
CAREVYGYYASSDSSPGAYDIW

SEQ ID NO: 44429 - protein, 22 aa, Homo sapiens
CAGGGTAMVVASFYYFLYMDLW

SEQ ID NO: 44430 - protein, 19 aa, Homo sapiens
CAKGRTDNMITFGGDVDYW

SEQ ID NO: 44431 - protein, 13 aa, Homo sapiens
CQSSDSSLTYWMF

SEQ ID NO: 44432 - protein, 16 aa, Homo sapiens
CATDRVFNSAYYFDSW

SEQ ID NO: 44433 - protein, 16 aa, Homo sapiens
CARNLYGPAGSYNDYW

SEQ ID NO: 44434 - protein, 20 aa, Homo sapiens
CARLRRSGWLTRPRYYFDYW

SEQ ID NO: 44435 - protein, 22 aa, Homo sapiens
CARVEGTMVRGVITGTAWVDPW

SEQ ID NO: 44436 - protein, 25 aa, Homo sapiens
CAKDNSYDILSTYYPSQYYYYMDVW

SEQ ID NO: 44437 - protein, 22 aa, Homo sapiens
CANSQGPYCSGGDCYPIYFDLW

SEQ ID NO: 44438 - protein, 16 aa, Homo sapiens
CAKGWGNMIHQYFDSW

SEQ ID NO: 44439 - protein, 21 aa, Homo sapiens
CARVMSGYCSTTSCYLAFDLW

SEQ ID NO: 44440 - protein, 17 aa, Homo sapiens
CGKDGDSYHLGGALDIW

SEQ ID NO: 44441 - protein, 16 aa, Homo sapiens
CTRGVGIHDGYGGDYW

SEQ ID NO: 44442 - protein, 14 aa, Homo sapiens
CVKDLGHSYYFDYW

SEQ ID NO: 44443 - protein, 20 aa, Homo sapiens
CARARRGVGLMAYTASFDLW

SEQ ID NO: 44444 - protein, 14 aa, Homo sapiens
CARSTWSPGCFDIW

SEQ ID NO: 44445 - protein, 16 aa, Homo sapiens
CVRIFSGGWQPRFDPW

SEQ ID NO: 44446 - protein, 20 aa, Homo sapiens
CARLTYSSGWYAHHDAFDIW

SEQ ID NO: 44447 - protein, 17 aa, Homo sapiens
CATAGKYIYPPDTFDIW

SEQ ID NO: 44448 - protein, 24 aa, Homo sapiens
CARLMGFADQIGTTAYDRSWFDLW

SEQ ID NO: 44449 - protein, 17 aa, Homo sapiens
CARLPSYPPRDWFVDYW

SEQ ID NO: 44450 - protein, 17 aa, Homo sapiens
CTRDKAEWQLLGGLDYW

SEQ ID NO: 44451 - protein, 21 aa, Homo sapiens
CARDPVFIAFGPIRYYYMDVW

SEQ ID NO: 44452 - protein, 18 aa, Homo sapiens
CARLGRYYSTSSVYFDNW

SEQ ID NO: 44453 - protein, 18 aa, Homo sapiens
CVSLTYYDILTGFSFDYW

SEQ ID NO: 44454 - protein, 15 aa, Homo sapiens
CAKDQGLSWYFFDYW

SEQ ID NO: 44455 - protein, 20 aa, Homo sapiens
CARYSGHSSSPYYYYYMDVW

SEQ ID NO: 44456 - protein, 19 aa, Homo sapiens
CARDGGSYLEYYFYYMDVW

SEQ ID NO: 44457 - protein, 17 aa, Homo sapiens
CARVGHYSGSYNVGDYW

SEQ ID NO: 44458 - protein, 17 aa, Homo sapiens
CTREGWYSSGQNWFDPW

SEQ ID NO: 44459 - protein, 18 aa, Homo sapiens
CARVEYQLLTANNWFDPW

SEQ ID NO: 44460 - protein, 19 aa, Homo sapiens
CAKARGHIIEASGWDFDSW

SEQ ID NO: 44461 - protein, 16 aa, Homo sapiens
CTTDQTTADPPIFDHW

SEQ ID NO: 44462 - protein, 15 aa, Homo sapiens
CAKTNYYDSSGYDYW

SEQ ID NO: 44463 - protein, 18 aa, Homo sapiens
CAKDIRAMREYGDSFHYW

SEQ ID NO: 44464 - protein, 17 aa, Homo sapiens
CAKAKVFGDYYYYMDVW

SEQ ID NO: 44465 - protein, 14 aa, Homo sapiens
CITVGPAGRPFEYW

SEQ ID NO: 44466 - protein, 17 aa, Homo sapiens
CARPEKQRTYYDAFDIW

SEQ ID NO: 44467 - protein, 20 aa, Homo sapiens
CARENSPDILTGYFQGPDYW

SEQ ID NO: 44468 - protein, 19 aa, Homo sapiens
CARAGPDNLNYYDSPFDYW

SEQ ID NO: 44469 - protein, 18 aa, Homo sapiens
CAILDDCSRTSCYSWDYW

SEQ ID NO: 44470 - protein, 18 aa, Homo sapiens
CARDLRFSGYVSYYFDYW

SEQ ID NO: 44471 - protein, 18 aa, Homo sapiens
CARASDVVVPAIYFFDYW

SEQ ID NO: 44472 - protein, 19 aa, Homo sapiens
CALSGGLAAAGKGNWFGPW

SEQ ID NO: 44473 - protein, 13 aa, Homo sapiens
CATTLTGDWFDPW

SEQ ID NO: 44474 - protein, 20 aa, Homo sapiens
CARGPLPPLIGARLSWFDPW

SEQ ID NO: 44475 - protein, 19 aa, Homo sapiens
CARGGDNYNLYYYYYMAVW

SEQ ID NO: 44476 - protein, 17 aa, Homo sapiens
CARIVGSGNYAYHFDFW

SEQ ID NO: 44477 - protein, 25 aa, Homo sapiens
CARAREDYSDTGGYYGTGLYFFDYW

SEQ ID NO: 44478 - protein, 23 aa, Homo sapiens
CARVPEYCDRTSCSYYYYYMDVW

SEQ ID NO: 44479 - protein, 22 aa, Homo sapiens
CARVQFAEFSTPPYYSYYIDIW

SEQ ID NO: 44480 - protein, 14 aa, Homo sapiens
CARMTAVRGHFDYW

SEQ ID NO: 44481 - protein, 16 aa, Homo sapiens
CARDPAAAGFDDFDIW

SEQ ID NO: 44482 - protein, 18 aa, Homo sapiens
CARAGDSSGYYHPKYDYW

SEQ ID NO: 44483 - protein, 20 aa, Homo sapiens
CTREAYVEKWREITSAFDLW

SEQ ID NO: 44484 - protein, 15 aa, Homo sapiens
CASDRYSSQSNFDYW

SEQ ID NO: 44485 - protein, 13 aa, Homo sapiens
CAKDLFAWAFDHW

SEQ ID NO: 44486 - protein, 17 aa, Homo sapiens
CAKVRLQIIRRDAFDIW

SEQ ID NO: 44487 - protein, 17 aa, Homo sapiens
CASPRPDFGELLRFDYW

SEQ ID NO: 44488 - protein, 22 aa, Homo sapiens
CTKDQGYYDSSGYAIGNALDVW

SEQ ID NO: 44489 - protein, 16 aa, Homo sapiens
CARDFDILLMTYMDVW

SEQ ID NO: 44490 - protein, 23 aa, Homo sapiens
CARVSSLWFGGTLRYYHYYMDVW

SEQ ID NO: 44491 - protein, 17 aa, Homo sapiens
CAKMFGDLLDYFYVDAW

SEQ ID NO: 44492 - protein, 22 aa, Homo sapiens
CATRPRLRDIVATTNRDTFDIW

SEQ ID NO: 44493 - protein, 19 aa, Homo sapiens
CAKDAGYGSGALLLGIDYW

SEQ ID NO: 44494 - protein, 19 aa, Homo sapiens
CARHEDSELDNVAVWFDPW

SEQ ID NO: 44495 - protein, 21 aa, Homo sapiens
CAKGGGEQQLVPYYYYYMDVW

SEQ ID NO: 44496 - protein, 22 aa, Homo sapiens
CARLERGPPTNYYYDNNGFAYW

SEQ ID NO: 44497 - protein, 18 aa, Homo sapiens
CARDPDYYGGSGPHLDYW

SEQ ID NO: 44498 - protein, 20 aa, Homo sapiens
CARLFSLPSFYDSGSFIDYW

SEQ ID NO: 44499 - protein, 24 aa, Homo sapiens
CARDGSRYSYGYVPYYYYYYMDVW

SEQ ID NO: 44500 - protein, 20 aa, Homo sapiens
CASQACSDTSCSPDWYFDLW

SEQ ID NO: 44501 - protein, 18 aa, Homo sapiens
CVRAPVNHLLWAAPLDYW

SEQ ID NO: 44502 - protein, 20 aa, Homo sapiens
CARYQRDAARPKSGYFFDFW

SEQ ID NO: 44503 - protein, 22 aa, Homo sapiens
CARESDYDRSGYFLSSESPDYW

SEQ ID NO: 44504 - protein, 24 aa, Homo sapiens
CARSRPDGSHSSGSSPLSGPFDIW

SEQ ID NO: 44505 - protein, 26 aa, Homo sapiens
CARVWRFCSGSPGTSCFSFRDAFDVW

SEQ ID NO: 44506 - protein, 18 aa, Homo sapiens
CAKVSFGSGTYLGDFDSW

SEQ ID NO: 44507 - protein, 19 aa, Homo sapiens
CAKEQEQSQWELEGGHDYW

SEQ ID NO: 44508 - protein, 18 aa, Homo sapiens
CARGDYYASGSRNPFDYW

SEQ ID NO: 44509 - protein, 20 aa, Homo sapiens
CAKDVAGGTPYDSSGYHDYW

SEQ ID NO: 44510 - protein, 21 aa, Homo sapiens
CTRQATDIAVVPAAENWFDPW

SEQ ID NO: 44511 - protein, 21 aa, Homo sapiens
CARVSRRYKFGYGYYYYIDVW

SEQ ID NO: 44512 - protein, 15 aa, Homo sapiens
CARVEVAAAPYFDYW

SEQ ID NO: 44513 - protein, 19 aa, Homo sapiens
CARLLKTSMYSSIDVFDMW

SEQ ID NO: 44514 - protein, 19 aa, Homo sapiens
CARHMAGLLWGSGWCFDSW

SEQ ID NO: 44515 - protein, 16 aa, Homo sapiens
CAAPPYTNAWYYFDYW

SEQ ID NO: 44516 - protein, 16 aa, Homo sapiens
CTTPGMYNWNYGFDSW

SEQ ID NO: 44517 - protein, 15 aa, Homo sapiens
CAKALGSYWGTFDYW

SEQ ID NO: 44518 - protein, 16 aa, Homo sapiens
CARIGGATKRDAFDFW

SEQ ID NO: 44519 - protein, 17 aa, Homo sapiens
CATSRSSASFGYGFDNW

SEQ ID NO: 44520 - protein, 19 aa, Homo sapiens
CARQPLALSVVATAAIDYW

SEQ ID NO: 44521 - protein, 19 aa, Homo sapiens
CASGYYGSGTKNNVRFDYW

SEQ ID NO: 44522 - protein, 15 aa, Homo sapiens
CAKGPQTMRGPIDYW

SEQ ID NO: 44523 - protein, 24 aa, Homo sapiens
CARASLVWFGELFHSLSGGWFDPW

SEQ ID NO: 44524 - protein, 14 aa, Homo sapiens [sequence omitted]

SEQ ID NO: 44525 - protein, 16 aa, Homo sapiens
CARAIVYRRVDAFDIW

SEQ ID NO: 44526 - protein, 13 aa, Homo sapiens
CARALYGRRFDIW

SEQ ID NO: 44527 - protein, 13 aa, Homo sapiens
CCRDGYNFPLDYW

SEQ ID NO: 44528 - protein, 16 aa, Homo sapiens
CARHDIVLIVYAFDYW

SEQ ID NO: 44529 - protein, 17 aa, Homo sapiens
CAREPQNRAYDWAFDYW

SEQ ID NO: 44530 - protein, 18 aa, Homo sapiens
CARTVLVGARMWGFFDYW

SEQ ID NO: 44531 - protein, 21 aa, Homo sapiens
CARISIALIEGSQYYYYMDVW

SEQ ID NO: 44532 - protein, 22 aa, Homo sapiens
CARGPDIGVVLSATGYDWFDSW

SEQ ID NO: 44533 - protein, 16 aa, Homo sapiens
CAKGRLGYHYWYFDLW

SEQ ID NO: 44534 - protein, 27 aa, Homo sapiens
CARKAVRLNLLGTPLLRGVPRAPFDFW

SEQ ID NO: 44535 - protein, 17 aa, Homo sapiens
CATDLVSLPPGIVSDYW

SEQ ID NO: 44536 - protein, 22 aa, Homo sapiens
CARVLGGYREWWLRPVYYMDVW

SEQ ID NO: 44537 - protein, 16 aa, Homo sapiens
CAHSLFSSAWRYFDYW

SEQ ID NO: 44538 - protein, 14 aa, Homo sapiens
CASEGVDIVPFDSW

SEQ ID NO: 44539 - protein, 13 aa, Homo sapiens
CCSYSSSNIPVVF

SEQ ID NO: 44540 - protein, 20 aa, Homo sapiens
CAKDRGRFGPGIHPDVFDLW

SEQ ID NO: 44541 - protein, 22 aa, Homo sapiens
CARHVIHSNGWFEGDMGPFDFW

SEQ ID NO: 44542 - protein, 20 aa, Homo sapiens
CAKISGQFYFDSSASYFDFW

SEQ ID NO: 44543 - protein, 14 aa, Homo sapiens
CARLQFRGHPIDYW

SEQ ID NO: 44544 - protein, 16 aa, Homo sapiens
CTTALATTGFGAFDVW

SEQ ID NO: 44545 - protein, 16 aa, Homo sapiens
CAKPGTTLIRDAFDIW

SEQ ID NO: 44546 - protein, 23 aa, Homo sapiens
CARYIRNYYGSGSYPNHNWFDPW

SEQ ID NO: 44547 - protein, 25 aa, Homo sapiens
CVRVLDCRTTSCSGGYYSYYYMDVW

SEQ ID NO: 44548 - protein, 22 aa, Homo sapiens
CAAEINRISLELAVAYYYFDYW

SEQ ID NO: 44549 - protein, 17 aa, Homo sapiens
CAKAARWLQVYDALDIW

SEQ ID NO: 44550 - protein, 19 aa, Homo sapiens
CSVEKGSYYESSGSSFDYW

SEQ ID NO: 44551 - protein, 15 aa, Homo sapiens
CARDGGPSRWSFDLW

SEQ ID NO: 44552 - protein, 17 aa, Homo sapiens
CAKDFSGWDLKWYFDLW

SEQ ID NO: 44553 - protein, 18 aa, Homo sapiens
CTRGTLVRGVGPASFDYW

SEQ ID NO: 44554 - protein, 23 aa, Homo sapiens
CARHDWDDSVSERYYFYFYMDVW

SEQ ID NO: 44555 - protein, 23 aa, Homo sapiens
CAKDYIFYYDSSIYYPPYYFDYW

SEQ ID NO: 44556 - protein, 14 aa, Homo sapiens
CARGFGVPHNFDVW

SEQ ID NO: 44557 - protein, 14 aa, Homo sapiens
CQLWDSSSAHSVLF

SEQ ID NO: 44558 - protein, 17 aa, Homo sapiens
CARGSGLKGFQYYFDYW

SEQ ID NO: 44559 - protein, 16 aa, Homo sapiens
CARVSPDSNSSPFDYW

SEQ ID NO: 44560 - protein, 22 aa, Homo sapiens
CARVGRAFRGVIYYYYYYMDVW

SEQ ID NO: 44561 - protein, 19 aa, Homo sapiens
CQSYDISLSDSTVSGPGVF

SEQ ID NO: 44562 - protein, 13 aa, Homo sapiens
CVRVSSWHYYDYW

SEQ ID NO: 44563 - protein, 20 aa, Homo sapiens
CATGDLYGDYESYYYYMDVW

SEQ ID NO: 44564 - protein, 19 aa, Homo sapiens
CARDRPRAPYDMGGVFDIW

SEQ ID NO: 44565 - protein, 12 aa, Homo sapiens
CQQRSDWQDFTF

SEQ ID NO: 44566 - protein, 17 aa, Homo sapiens
CARDNRGSYYSEYFQHW

SEQ ID NO: 44567 - protein, 20 aa, Homo sapiens
CARSQMYSLFRGVIDYFDYW

SEQ ID NO: 44568 - protein, 21 aa, Homo sapiens
CARRARRPNIVAAFGTPFDYW

SEQ ID NO: 44569 - protein, 24 aa, Homo sapiens
CARVPNTLYGSGSYWVYYYYMDVW

SEQ ID NO: 44570 - protein, 18 aa, Homo sapiens
CARLSPDSGGIYNGLDYW

SEQ ID NO: 44571 - protein, 15 aa, Homo sapiens
CVRGSWETHDAFDIW

SEQ ID NO: 44572 - protein, 20 aa, Homo sapiens
CARDLEYYYGSENYEDDDYW

SEQ ID NO: 44573 - protein, 13 aa, Homo sapiens
CARGGGNTIFDYW

SEQ ID NO: 44574 - protein, 20 aa, Homo sapiens
CARVPLGYYDRTGYYYFDYW

SEQ ID NO: 44575 - protein, 18 aa, Homo sapiens
CLVYCSSANCIPAPFEYW

SEQ ID NO: 44576 - protein, 16 aa, Homo sapiens
CARGVVPAAITTFDPW

SEQ ID NO: 44577 - protein, 14 aa, Homo sapiens
CARDFRSSGYFDYW

SEQ ID NO: 44578 - protein, 22 aa, Homo sapiens
CARMPKQPVSGEDYYYYYMDVW

SEQ ID NO: 44579 - protein, 23 aa, Homo sapiens
CAKALQYNNFWGGHPTSDALDVW

SEQ ID NO: 44580 - protein, 19 aa, Homo sapiens
CARQISQSYSDSSGPFDYW

SEQ ID NO: 44581 - protein, 17 aa, Homo sapiens
CARRPFSFGYFGYFDLW

SEQ ID NO: 44582 - protein, 14 aa, Homo sapiens
CARMYDNKWYLDSW

SEQ ID NO: 44583 - protein, 15 aa, Homo sapiens
CAPSRITAKEGFDPW

SEQ ID NO: 44584 - protein, 18 aa, Homo sapiens
CATRSIDILTGNDAFDIW

SEQ ID NO: 44585 - protein, 16 aa, Homo sapiens
CARVFYDSGGQRFDFW

SEQ ID NO: 44586 - protein, 17 aa, Homo sapiens
CARGRDYNDYRFYFDLW

SEQ ID NO: 44587 - protein, 17 aa, Homo sapiens
CARGFYPWSLSWYFDLW

SEQ ID NO: 44588 - protein, 23 aa, Homo sapiens
CTREVSGSYYWPSLAYYYYMDVW

SEQ ID NO: 44589 - protein, 14 aa, Homo sapiens
CARGGDDRPYFDYW

SEQ ID NO: 44590 - protein, 18 aa, Homo sapiens
CARLLPVAAETPYYFDNW

SEQ ID NO: 44591 - protein, 17 aa, Homo sapiens
CAKVSPLRGVPDAFDIW

SEQ ID NO: 44592 - protein, 18 aa, Homo sapiens
CARDSGGKEGSSWYLDYW

SEQ ID NO: 44593 - protein, 18 aa, Homo sapiens
CARLGPYDSSGYMAFDIW

SEQ ID NO: 44594 - protein, 20 aa, Homo sapiens
CVKFAPSHCSSTHCSYFDFW

SEQ ID NO: 44595 - protein, 25 aa, Homo sapiens
CARHGGSTSLGITMVRGLIPWFDPW

SEQ ID NO: 44596 - protein, 23 aa, Homo sapiens
CARGPPGYYDSSGWNYYHYLDIW

SEQ ID NO: 44597 - protein, 14 aa, Homo sapiens
CTSYTSTSTFHVLF

SEQ ID NO: 44598 - protein, 13 aa, Homo sapiens
CARAFNGDFVDYW

SEQ ID NO: 44599 - protein, 17 aa, Homo sapiens
CARGGSIVSDSGPFDYW

SEQ ID NO: 44600 - protein, 23 aa, Homo sapiens
CARDRVYNFWSGFHSGRAPFDSW

SEQ ID NO: 44601 - protein, 19 aa, Homo sapiens
CAKDFLPRRVIMSNWFDSW

SEQ ID NO: 44602 - protein, 22 aa, Homo sapiens
CAKSALLWFGGSSHHTPQFDSW

SEQ ID NO: 44603 - protein, 20 aa, Homo sapiens
CARDGDYNTWRSYYGDFDYW

SEQ ID NO: 44604 - protein, 23 aa, Homo sapiens
CARDGGLAKGYYDSSAYNWFDPW

SEQ ID NO: 44605 - protein, 17 aa, Homo sapiens
CARGSGTDYRGDAFDLW

SEQ ID NO: 44606 - protein, 12 aa, Homo sapiens
CATSRYFDCDYW

SEQ ID NO: 44607 - protein, 17 aa, Homo sapiens
CARDRRRMGTPNFFDPW

SEQ ID NO: 44608 - protein, 11 aa, Homo sapiens
CGRLLYYFDVW

SEQ ID NO: 44609 - protein, 14 aa, Homo sapiens
CAAWNDSLSHTGVF

SEQ ID NO: 44610 - protein, 8 aa, Homo sapiens
CARRFDLW

SEQ ID NO: 44611 - protein, 17 aa, Homo sapiens
CARVMVPATATGSFDVW

SEQ ID NO: 44612 - protein, 18 aa, Homo sapiens
CAKDRDDGYYFYYYMDVW

SEQ ID NO: 44613 - protein, 19 aa, Homo sapiens
CARRAGAATGPRAYTFDIW

SEQ ID NO: 44614 - protein, 19 aa, Homo sapiens
CARRGYYPGSGSERYFDSW

SEQ ID NO: 44615 - protein, 19 aa, Homo sapiens
CATYCSGFSCYPNDAFDIW

SEQ ID NO: 44616 - protein, 18 aa, Homo sapiens
CAKDVDDYDTSGYALDIW

SEQ ID NO: 44617 - protein, 20 aa, Homo sapiens
CAKDEASNPGSGSLYYFDYW

SEQ ID NO: 44618 - protein, 18 aa, Homo sapiens
CARARYCSSTSCQDFDYW

SEQ ID NO: 44619 - protein, 16 aa, Homo sapiens
CAKERGWELLHSFDYW

SEQ ID NO: 44620 - protein, 12 aa, Homo sapiens
CIRYIPFYFDSW

SEQ ID NO: 44621 - protein, 18 aa, Homo sapiens
CASPTTPDYGDYYYMDVW

SEQ ID NO: 44622 - protein, 21 aa, Homo sapiens
CARDRIPGFAVAPGSNWFDPW

SEQ ID NO: 44623 - protein, 16 aa, Homo sapiens
CAGSLASRGFYYFDYW

SEQ ID NO: 44624 - protein, 16 aa, Homo sapiens
CRGSWAEGGSMGIDYW

SEQ ID NO: 44625 - protein, 15 aa, Homo sapiens
CVRETKYASATFDYW

SEQ ID NO: 44626 - protein, 15 aa, Homo sapiens
CARMSSGTESPLDYW

SEQ ID NO: 44627 - protein, 18 aa, Homo sapiens
CAREDYYDASGPFAFDIW

SEQ ID NO: 44628 - protein, 17 aa, Homo sapiens
CATTEWDVLPRDTFDIW

SEQ ID NO: 44629 - protein, 17 aa, Homo sapiens
CARRLGVSVEADGFDIW

SEQ ID NO: 44630 - protein, 23 aa, Homo sapiens
CARAGEASVGTFRRYYYYYMDVW

SEQ ID NO: 44631 - protein, 17 aa, Homo sapiens
CAREVLLGNSYYYMDVW

SEQ ID NO: 44632 - protein, 24 aa, Homo sapiens
CARQALFLTFYYSISGPGDPFDYW

SEQ ID NO: 44633 - protein, 21 aa, Homo sapiens
CARILPLQYGVSGSPAYFDYW

SEQ ID NO: 44634 - protein, 18 aa, Homo sapiens
CARDEGRADLNYYYMDVW

SEQ ID NO: 44635 - protein, 19 aa, Homo sapiens
CARAGHLVSYYHHFYMDVW

SEQ ID NO: 44636 - protein, 15 aa, Homo sapiens
CAVGVEDEIDTFHIW

SEQ ID NO: 44637 - protein, 18 aa, Homo sapiens
CARGSGSDYYYFYYMDVW

SEQ ID NO: 44638 - protein, 15 aa, Homo sapiens
CARHEYTSGWHFDYW

SEQ ID NO: 44639 - protein, 20 aa, Homo sapiens
CAKDRQAAAHAGNVDALDLW

SEQ ID NO: 44640 - protein, 17 aa, Homo sapiens
CTLPIVATITGDAFDIW

SEQ ID NO: 44641 - protein, 21 aa, Homo sapiens
CVRRGGYYDSSGYYSYTFDVW

SEQ ID NO: 44642 - protein, 18 aa, Homo sapiens
CALLPVSSSWQASIFDYW

SEQ ID NO: 44643 - protein, 19 aa, Homo sapiens
CARVLVGATLSYYYYMDVW

SEQ ID NO: 44644 - protein, 19 aa, Homo sapiens
CVRGGPVGLGEATDKYFYW

SEQ ID NO: 44645 - protein, 22 aa, Homo sapiens
CARDAGVVAVGGSSSYYYMDVW

SEQ ID NO: 44646 - protein, 10 aa, Homo sapiens
CTRGDSFGVW

SEQ ID NO: 44647 - protein, 18 aa, Homo sapiens
CARLHNDNSDYPAYFDYW

SEQ ID NO: 44648 - protein, 17 aa, Homo sapiens
CTTDLAVTTVTRFFDYW

SEQ ID NO: 44649 - protein, 16 aa, Homo sapiens
CATGRFGEESTWFDTW

SEQ ID NO: 44650 - protein, 16 aa, Homo sapiens
CARRLAVVVDPTPDYW

SEQ ID NO: 44651 - protein, 19 aa, Homo sapiens
CARERRHYDILTGPSVDYW

SEQ ID NO: 44652 - protein, 16 aa, Homo sapiens
CTHERIGTTGRGFDYW

SEQ ID NO: 44653 - protein, 19 aa, Homo sapiens
CARLASGTYPYYYYYMDVW

SEQ ID NO: 44654 - protein, 19 aa, Homo sapiens
CARDTPAGRDSSQGAFDLW

SEQ ID NO: 44655 - protein, 17 aa, Homo sapiens
CARDPSNLPNYLYFDLW

SEQ ID NO: 44656 - protein, 23 aa, Homo sapiens
CARGLGYSGYDFVAFYYYYMDVW

SEQ ID NO: 44657 - protein, 24 aa, Homo sapiens
CAKDSVSQYYNFWSGYQSPDFDYW

SEQ ID NO: 44658 - protein, 27 aa, Homo sapiens
CARSVRQWERPGTGGGSYYYYYYTDVW

SEQ ID NO: 44659 - protein, 18 aa, Homo sapiens
CTRDNMGWYYFSGALDIW

SEQ ID NO: 44660 - protein, 19 aa, Homo sapiens
CAKDRDDSSGYSYSHFDSW

SEQ ID NO: 44661 - protein, 21 aa, Homo sapiens
CATVTLDCSGPSCRMDAFDIW

SEQ ID NO: 44662 - protein, 18 aa, Homo sapiens
CASWGLYSVGGYDLQDYW

SEQ ID NO: 44663 - protein, 18 aa, Homo sapiens
CTTTDPIEVMSGSGFDYW

SEQ ID NO: 44664 - protein, 21 aa, Homo sapiens
CATRAVLIRIATEGENAFDIW

SEQ ID NO: 44665 - protein, 16 aa, Homo sapiens
CASPHRGGTTLPFDYW

SEQ ID NO: 44666 - protein, 16 aa, Homo sapiens
CVAETIYDSYYYMDVW

SEQ ID NO: 44667 - protein, 12 aa, Homo sapiens [sequence omitted]

SEQ ID NO: 44668 - protein, 15 aa, Homo sapiens
CAREGQITQDAFDLW

SEQ ID NO: 44669 - protein, 16 aa, Homo sapiens
CARADCSGGSCQLDYW

SEQ ID NO: 44670 - protein, 19 aa, Homo sapiens
CTKSTRHRSGWYDWAFHIW

SEQ ID NO: 44671 - protein, 19 aa, Homo sapiens
CARVWDIVATTKEYYFDYW

SEQ ID NO: 44672 - protein, 17 aa, Homo sapiens
CARDVRWFGGPGWFDPW

SEQ ID NO: 44673 - protein, 24 aa, Homo sapiens
CARDQANWGSKGGPYYYHYYMDVW

SEQ ID NO: 44674 - protein, 12 aa, Homo sapiens
CVRDVSGLFDLW

SEQ ID NO: 44675 - protein, 16 aa, Homo sapiens
CARSRFAGRYTPYDYW

SEQ ID NO: 44676 - protein, 25 aa, Homo sapiens
CATGLEGYFDILTGQYEEGKWLDPW

SEQ ID NO: 44677 - protein, 24 aa, Homo sapiens
CARDAGGDRVIVATMDYYYYMDVW

SEQ ID NO: 44678 - protein, 26 aa, Homo sapiens
CARDPHCVSLSCFLPKNNFYSYMDVW

SEQ ID NO: 44679 - protein, 17 aa, Homo sapiens
CARDFWTVTSDSLFDNW

SEQ ID NO: 44680 - protein, 19 aa, Homo sapiens
CARDSRDYYASSGYLFQYW

SEQ ID NO: 44681 - protein, 23 aa, Homo sapiens
CARDPRITIVRGIISHYYYMDVW

SEQ ID NO: 44682 - protein, 24 aa, Homo sapiens
CARGRRDTMIVVVIRLTTYYFDYW

SEQ ID NO: 44683 - protein, 15 aa, Homo sapiens
CAKDMRDTREAFEIW

SEQ ID NO: 44684 - protein, 21 aa, Homo sapiens
CARRIGWTMIIVVISPYFDYW

SEQ ID NO: 44685 - protein, 16 aa, Homo sapiens
CVRGDGVTTNGEFDYW

SEQ ID NO: 44686 - protein, 16 aa, Homo sapiens
CARGNYEDYDAAFDIW

SEQ ID NO: 44687 - protein, 18 aa, Homo sapiens
CARWSRENDGVPKWFDPW

SEQ ID NO: 44688 - protein, 11 aa, Homo sapiens
CQQLSAYPLPF

SEQ ID NO: 44689 - protein, 14 aa, Homo sapiens
CARHLRAAVYFDYW

SEQ ID NO: 44690 - protein, 20 aa, Homo sapiens
CARVIMSADLDDYYYYMDVW

SEQ ID NO: 44691 - protein, 16 aa, Homo sapiens
CARDVVPYNNEAIDYW

SEQ ID NO: 44692 - protein, 13 aa, Homo sapiens
CALTLSWAPLDYW

SEQ ID NO: 44693 - protein, 17 aa, Homo sapiens
CARERSGYFHRGVFDYW

SEQ ID NO: 44694 - protein, 16 aa, Homo sapiens
CARPAAAGRNWYFDLW

SEQ ID NO: 44695 - protein, 20 aa, Homo sapiens
CARLGYNFGYLISEGYLDYW

SEQ ID NO: 44696 - protein, 18 aa, Homo sapiens
CATLRDLKMVRIIHFDSW

SEQ ID NO: 44697 - protein, 18 aa, Homo sapiens
CARDISYGPAGIHWFDPW

SEQ ID NO: 44698 - protein, 20 aa, Homo sapiens
CARAPYNFWSGYTPYYFDSW

SEQ ID NO: 44699 - protein, 14 aa, Homo sapiens
CARNIAAITRIDYW

SEQ ID NO: 44700 - protein, 14 aa, Homo sapiens
CSGGSCHYNWFDPW

SEQ ID NO: 44701 - protein, 16 aa, Homo sapiens
CGKVDVGELHGALDYW

SEQ ID NO: 44702 - protein, 17 aa, Homo sapiens
CVRDGGSDWYEGWFDPW

SEQ ID NO: 44703 - protein, 23 aa, Homo sapiens
CARLKKYDRSGFHAYYYYYMDVW

SEQ ID NO: 44704 - protein, 16 aa, Homo sapiens
CALDKVFGSTFSFDNW

SEQ ID NO: 44705 - protein, 16 aa, Homo sapiens
CAHKTIAVAGPYFDCW

SEQ ID NO: 44706 - protein, 17 aa, Homo sapiens
CTRYSVEMGTIQAFDVW

SEQ ID NO: 44707 - protein, 17 aa, Homo sapiens
CAKASREITRPYYLDYW

SEQ ID NO: 44708 - protein, 21 aa, Homo sapiens
CARGGGYRGDDYVEAKWFDPW

SEQ ID NO: 44709 - protein, 16 aa, Homo sapiens
CARERLTMRGAHCDYW

SEQ ID NO: 44710 - protein, 22 aa, Homo sapiens
CARGETTYYYTSSGYLEGFKYW

SEQ ID NO: 44711 - protein, 15 aa, Homo sapiens
CVKDPGDMDSYFDYW

SEQ ID NO: 44712 - protein, 19 aa, Homo sapiens
CARGSIGAWRELLGYFDYW

SEQ ID NO: 44713 - protein, 13 aa, Homo sapiens
CARGRELRAFDIW

SEQ ID NO: 44714 - protein, 21 aa, Homo sapiens
CARDRESRYFDWLVSPDLDYW

SEQ ID NO: 44715 - protein, 17 aa, Homo sapiens
CARAGGLAGDRTAFDIW

SEQ ID NO: 44716 - protein, 20 aa, Homo sapiens
CARVARGYYDSRSSRGVDYW

SEQ ID NO: 44717 - protein, 19 aa, Homo sapiens
CARRGHYDSSGRVVGFDSW

SEQ ID NO: 44718 - protein, 18 aa, Homo sapiens
CAKYYYDSRGYNEYFQHW

SEQ ID NO: 44719 - protein, 21 aa, Homo sapiens
CARDTAYYYGSSDYSGYMDVW

SEQ ID NO: 44720 - protein, 16 aa, Homo sapiens
CTRQSWLRFPDAFDVW

SEQ ID NO: 44721 - protein, 19 aa, Homo sapiens
CARHNDDILTGFSHYFEFW

SEQ ID NO: 44722 - protein, 21 aa, Homo sapiens
CAWGDSYYYESSGYSDAFAIW

SEQ ID NO: 44723 - protein, 22 aa, Homo sapiens
CARGRYFDWVLYKGIAYYIDYW

SEQ ID NO: 44724 - protein, 23 aa, Homo sapiens
CAKQLEDFGWYTSGWYGGVFDYW

SEQ ID NO: 44725 - protein, 18 aa, Homo sapiens
CASSQYYSGSSPTWFDPW

SEQ ID NO: 44726 - protein, 17 aa, Homo sapiens
CATQAVAGFSGEYFHHW

SEQ ID NO: 44727 - protein, 21 aa, Homo sapiens
CAKDPSNCAGGCLEENYFDYW

SEQ ID NO: 44728 - protein, 17 aa, Homo sapiens
CVRLVDILIGYFNFDTW

SEQ ID NO: 44729 - protein, 23 aa, Homo sapiens
CVKDFDMDIAAAIDTTDDAFDIW

SEQ ID NO: 44730 - protein, 15 aa, Homo sapiens
CARGLSSVVGYREYW

SEQ ID NO: 44731 - protein, 22 aa, Homo sapiens
CARDNLGSGFFGESVPLHFDFW

SEQ ID NO: 44732 - protein, 17 aa, Homo sapiens
CAKDLSPFVEWELFDYW

SEQ ID NO: 44733 - protein, 14 aa, Homo sapiens
CASVVTAIGAPDVW

SEQ ID NO: 44734 - protein, 20 aa, Homo sapiens
CARDNLEVATAYNYFYMDVW

SEQ ID NO: 44735 - protein, 20 aa, Homo sapiens
CARRGVLTSAFSDYYYLDVW

SEQ ID NO: 44736 - protein, 23 aa, Homo sapiens
CARDWTGITMVRGVIIWGWFDPW

SEQ ID NO: 44737 - protein, 16 aa, Homo sapiens
CARETDYNGSGKFDSW

SEQ ID NO: 44738 - protein, 18 aa, Homo sapiens
CARSYYDSSGYWAPFDYW

SEQ ID NO: 44739 - protein, 13 aa, Homo sapiens
CAKDLGGNLFDSW

SEQ ID NO: 44740 - protein, 19 aa, Homo sapiens
CARIWNIAVAAPGGVFDIW

SEQ ID NO: 44741 - protein, 17 aa, Homo sapiens
CAMLVTMIRGPNMEDYW

SEQ ID NO: 44742 - protein, 17 aa, Homo sapiens
CAHRVHYGWSSYYFDYW

SEQ ID NO: 44743 - protein, 22 aa, Homo sapiens
CVQDSFNYHTSVYQGEGYFANW

SEQ ID NO: 44744 - protein, 18 aa, Homo sapiens
CARLKDEWLVRPHCFDPW

SEQ ID NO: 44745 - protein, 19 aa, Homo sapiens
CAKDPNYYASGSPYYFDYW

SEQ ID NO: 44746 - protein, 15 aa, Homo sapiens
CARSGGWETAMADYW

SEQ ID NO: 44747 - protein, 16 aa, Homo sapiens
CAKDRGQVLMYYFQNW

SEQ ID NO: 44748 - protein, 23 aa, Homo sapiens
CTTDPPRYSYVPGVVITHPFDYW

SEQ ID NO: 44749 - protein, 17 aa, Homo sapiens
CARHGGRSAYYYYFDFW

SEQ ID NO: 44750 - protein, 20 aa, Homo sapiens
CARARSGYFDWLLSFYFDYW

SEQ ID NO: 44751 - protein, 15 aa, Homo sapiens
CATPTVRALLPFDYW

SEQ ID NO: 44752 - protein, 15 aa, Homo sapiens
CARGEITRNRYFHHW

SEQ ID NO: 44753 - protein, 17 aa, Homo sapiens
CARGHNHDDTGFVFDYW

SEQ ID NO: 44754 - protein, 21 aa, Homo sapiens
CAKDIGRLNYDILTGCFFDYW

SEQ ID NO: 44755 - protein, 19 aa, Homo sapiens
CARDEGCSGDTCNSALDYW

SEQ ID NO: 44756 - protein, 24 aa, Homo sapiens
CARHRPIVDATTALLDYYYYMDVW

SEQ ID NO: 44757 - protein, 18 aa, Homo sapiens
CVREDHSTGYHMEAFDLW

SEQ ID NO: 44758 - protein, 19 aa, Homo sapiens
CARTLATGFRHWPYYFDHW

SEQ ID NO: 44759 - protein, 17 aa, Homo sapiens
CARDGLRGYRPEYFQHW

SEQ ID NO: 44760 - protein, 16 aa, Homo sapiens
CANSHSRSWKYYFDYW

SEQ ID NO: 44761 - protein, 17 aa, Homo sapiens
CGRDWLQYRSSSGFDPW

SEQ ID NO: 44762 - protein, 21 aa, Homo sapiens
CARAALAYCGGDCYPGAFDIW

SEQ ID NO: 44763 - protein, 20 aa, Homo sapiens
CARGGTYNNIWSGSNWFDPW

SEQ ID NO: 44764 - protein, 18 aa, Homo sapiens
CASVLQQLLYSYWYFDLW

SEQ ID NO: 44765 - protein, 14 aa, Homo sapiens
CAKDQWFGAGCDYW

SEQ ID NO: 44766 - protein, 26 aa, Homo sapiens
CARHLSSPIEQWLLRSLYYYYYMDVW

SEQ ID NO: 44767 - protein, 15 aa, Homo sapiens
CAREGNSGWFTIDYW

SEQ ID NO: 44768 - protein, 18 aa, Homo sapiens
CTRDRRSEQQLEDWFDPW

SEQ ID NO: 44769 - protein, 17 aa, Homo sapiens
CAKEEFGDYYTSSLDYW

SEQ ID NO: 44770 - protein, 17 aa, Homo sapiens
CAKDTDYGDPYDAFHIW

SEQ ID NO: 44771 - protein, 18 aa, Homo sapiens
CAKFGPYYGDFNDAFDSW

SEQ ID NO: 44772 - protein, 20 aa, Homo sapiens
CARATDSEVVIDGFNWFDSW

SEQ ID NO: 44773 - protein, 21 aa, Homo sapiens
CAKDTGIAVVPFAISSGFDSW

SEQ ID NO: 44774 - protein, 23 aa, Homo sapiens
CARDAGYSSGWDWDDNEIFFDHW

SEQ ID NO: 44775 - protein, 18 aa, Homo sapiens
CARSGYDGSSYGAAFDNW

SEQ ID NO: 44776 - protein, 16 aa, Homo sapiens
CVRDASLQYFDFFDYW

SEQ ID NO: 44777 - protein, 18 aa, Homo sapiens
CAKGSGITIFGVVPGDYW

SEQ ID NO: 44778 - protein, 15 aa, Homo sapiens
CARGRWQWISPFDKW

SEQ ID NO: 44779 - protein, 22 aa, Homo sapiens
CARHYYDTSAYYYTHYWFFDLW

SEQ ID NO: 44780 - protein, 20 aa, Homo sapiens
CARDRRDDYLSLLSSYFDYW

SEQ ID NO: 44781 - protein, 14 aa, Homo sapiens
CAFLAGVRGGFDIW

SEQ ID NO: 44782 - protein, 17 aa, Homo sapiens
CTRGPHGYDSSGGFDYW

SEQ ID NO: 44783 - protein, 14 aa, Homo sapiens
CARGDDSSAAFDYW

SEQ ID NO: 44784 - protein, 19 aa, Homo sapiens
CARTMIVVATTEGDAFDIW

SEQ ID NO: 44785 - protein, 11 aa, Homo sapiens
CKQTLQTPLPF

SEQ ID NO: 44786 - protein, 19 aa, Homo sapiens
CARHGLAAAGTRRLKFDPW

SEQ ID NO: 44787 - protein, 18 aa, Homo sapiens
CARDPFPVGVDVATFDYW

SEQ ID NO: 44788 - protein, 16 aa, Homo sapiens
CARLTAVAGTAAFDIW

SEQ ID NO: 44789 - protein, 21 aa, Homo sapiens
CAKTPHPYGSGKHISKGFDYW

SEQ ID NO: 44790 - protein, 23 aa, Homo sapiens
CARDSTNYYDSSAFYYDRALDIW

SEQ ID NO: 44791 - protein, 17 aa, Homo sapiens
CARVHSSGYYPEYFQHW

SEQ ID NO: 44792 - protein, 20 aa, Homo sapiens
CATGPAERWLQFQPYYFDNW

SEQ ID NO: 44793 - protein, 20 aa, Homo sapiens
CTRGPHYSERVYYHPQYDYW

SEQ ID NO: 44794 - protein, 17 aa, Homo sapiens
CVREDYGVLTGPYFDLW

SEQ ID NO: 44795 - protein, 20 aa, Homo sapiens
CARDRFYGDSWATTPLFDLW

SEQ ID NO: 44796 - protein, 21 aa, Homo sapiens
CARARDYDSSGYYDTSPFDYW

SEQ ID NO: 44797 - protein, 22 aa, Homo sapiens
CARLETNGYSYGYYFYYYMDVW

SEQ ID NO: 44798 - protein, 20 aa, Homo sapiens
CAGAGKAGYSYDHTGAFDYW

SEQ ID NO: 44799 - protein, 16 aa, Homo sapiens
CARITGYREFYLFDPW

SEQ ID NO: 44800 - protein, 21 aa, Homo sapiens
CARDLGPVPGSPGFISVNDYW

SEQ ID NO: 44801 - protein, 13 aa, Homo sapiens
CGRELGIAVTDYW

SEQ ID NO: 44802 - protein, 18 aa, Homo sapiens
CARGMRDTNYDSSFLDYW

SEQ ID NO: 44803 - protein, 19 aa, Homo sapiens
CVRRLRQFGDLVRNVFDYW

SEQ ID NO: 44804 - protein, 18 aa, Homo sapiens
CARERVYFDSSPYYMDVW

SEQ ID NO: 44805 - protein, 12 aa, Homo sapiens
CATWNPPSLDYW

SEQ ID NO: 44806 - protein, 18 aa, Homo sapiens
CVVTAYSIYSGPKWFDPW

SEQ ID NO: 44807 - protein, 18 aa, Homo sapiens
CARVVGKIIAVAGTVDYW

SEQ ID NO: 44808 - protein, 13 aa, Homo sapiens
CARGGGGHENDYW

SEQ ID NO: 44809 - protein, 23 aa, Homo sapiens
CARFLRGTYLYGSGSNKDAFDIW

SEQ ID NO: 44810 - protein, 15 aa, Homo sapiens
CARAGFGELSYMDVW

SEQ ID NO: 44811 - protein, 17 aa, Homo sapiens
CAREHYGGNFDWYFDLW

SEQ ID NO: 44812 - protein, 19 aa, Homo sapiens
CARGKLLWFGDLLGYFDYW

SEQ ID NO: 44813 - protein, 16 aa, Homo sapiens
CTRVPRLGIFDAFDVW

SEQ ID NO: 44814 - protein, 16 aa, Homo sapiens
CAKDGITGTVDAFDIW

SEQ ID NO: 44815 - protein, 16 aa, Homo sapiens
CATGSIRRFGSWFDPW

SEQ ID NO: 44816 - protein, 20 aa, Homo sapiens
CARGISGYINFNYYSYMDVW

SEQ ID NO: 44817 - protein, 21 aa, Homo sapiens
CAMRDVAATMGDYYYYYMDVW

SEQ ID NO: 44818 - protein, 17 aa, Homo sapiens
CARAMTFDAVQYYFDFW

SEQ ID NO: 44819 - protein, 18 aa, Homo sapiens
CARVGYNFAYPRGWFDPW

SEQ ID NO: 44820 - protein, 17 aa, Homo sapiens
CAKGYIDYSGYYFFDYW

SEQ ID NO: 44821 - protein, 18 aa, Homo sapiens
CTRDRTDSGDFAGWFDPW

SEQ ID NO: 44822 - protein, 19 aa, Homo sapiens
CARDQGGGDHVRYGWFEPW

SEQ ID NO: 44823 - protein, 17 aa, Homo sapiens
CVRGLVAAALYNWFDPW

SEQ ID NO: 44824 - protein, 16 aa, Homo sapiens
CAKSGRFGELYWFDSW

SEQ ID NO: 44825 - protein, 15 aa, Homo sapiens
CAKDMGGGYDYADYW

SEQ ID NO: 44826 - protein, 16 aa, Homo sapiens
CARPHSGYGNRAFDIW

SEQ ID NO: 44827 - protein, 21 aa, Homo sapiens
CARDRLPIVVVTGTPSAFNVW

SEQ ID NO: 44828 - protein, 21 aa, Homo sapiens
CARDTAVVSRHYNYYYYMDVW

SEQ ID NO: 44829 - protein, 15 aa, Homo sapiens
CAKEYDFYYFYMDVW

SEQ ID NO: 44830 - protein, 16 aa, Homo sapiens
CVRGGDTMPRGAFDLW

SEQ ID NO: 44831 - protein, 21 aa, Homo sapiens
CARVPNYGGYRRYYYYYMDVW

SEQ ID NO: 44832 - protein, 17 aa, Homo sapiens
CARLTVTTLSEGAFDIW

SEQ ID NO: 44833 - protein, 18 aa, Homo sapiens
CARWPLWVLRFAAWFDPW

SEQ ID NO: 44834 - protein, 17 aa, Homo sapiens
CAGDTVTAGHVNYMDVW

SEQ ID NO: 44835 - protein, 18 aa, Homo sapiens
CAKRALGSYRRFGYFDYW

SEQ ID NO: 44836 - protein, 15 aa, Homo sapiens
CATSDSSGYYYSDYW

SEQ ID NO: 44837 - protein, 19 aa, Homo sapiens
CARVFSEPFYDSSGYCDSW

SEQ ID NO: 44838 - protein, 16 aa, Homo sapiens
CAKDSYSSSWFLVDYW

SEQ ID NO: 44839 - protein, 22 aa, Homo sapiens
CARDGGPGSSHYFRSDDAFDIW

SEQ ID NO: 44840 - protein, 16 aa, Homo sapiens
CAKDVAIRDGYNFDFW

SEQ ID NO: 44841 - protein, 19 aa, Homo sapiens
CARVLSMVRGVTTNWFDPW

SEQ ID NO: 44842 - protein, 15 aa, Homo sapiens
CAMTVATIAYYFNSW

SEQ ID NO: 44843 - protein, 24 aa, Homo sapiens
CTREAYVDQRGSRKVVISSAFDFW

SEQ ID NO: 44844 - protein, 16 aa, Homo sapiens
CARQFLEWVPDAFDMW

SEQ ID NO: 44845 - protein, 18 aa, Homo sapiens
CARGLSGQETSPYYFDSW

SEQ ID NO: 44846 - protein, 16 aa, Homo sapiens
CAREPPMIRLRAFDVW

SEQ ID NO: 44847 - protein, 17 aa, Homo sapiens
CASGNSGYDYYDAFDIW

SEQ ID NO: 44848 - protein, 22 aa, Homo sapiens
CAREVRDSDGSRSRLFYYMDVW

SEQ ID NO: 44849 - protein, 18 aa, Homo sapiens
CARDRDRIVGTMDAFDLW

SEQ ID NO: 44850 - protein, 18 aa, Homo sapiens
CATDLPFSGSYQPIFNYW

SEQ ID NO: 44851 - protein, 22 aa, Homo sapiens
CARDPYCSSASCYASIRWFDPW

SEQ ID NO: 44852 - protein, 19 aa, Homo sapiens
CARDNYDSYGPEGDWFDPW

SEQ ID NO: 44853 - protein, 24 aa, Homo sapiens
CARHMSRVTIFGVVLKRDDAFDIW

SEQ ID NO: 44854 - protein, 24 aa, Homo sapiens
CARAIFPYYYDSSGYYYDYYFDYW

SEQ ID NO: 44855 - protein, 22 aa, Homo sapiens
CAKDIEAYYDNGGYYGTVPDYW

SEQ ID NO: 44856 - protein, 21 aa, Homo sapiens
CARGRVVAMAGTHRGGWFDPW

SEQ ID NO: 44857 - protein, 15 aa, Homo sapiens
CTTEGASKAGGFDPW

SEQ ID NO: 44858 - protein, 18 aa, Homo sapiens
CAIFLYYDSTGYYYFDNW

SEQ ID NO: 44859 - protein, 14 aa, Homo sapiens
CARTQWLVEPPDYW

SEQ ID NO: 44860 - protein, 26 aa, Homo sapiens
CAKGGTHYFQSSDSSARVTPSNFDSW

SEQ ID NO: 44861 - protein, 17 aa, Homo sapiens
CASASDRAVAEGYFDYW

SEQ ID NO: 44862 - protein, 20 aa, Homo sapiens
CQHYGNSPPYNSGQGAPYTF

SEQ ID NO: 44863 - protein, 27 aa, Homo sapiens
CARALEDIVVVPGAPPNYSYYYYMDVW

SEQ ID NO: 44864 - protein, 17 aa, Homo sapiens
CARHMESSSSLDAFDIW

SEQ ID NO: 44865 - protein, 22 aa, Homo sapiens
CARGAGIAAAGVVGYYYYMDVW

SEQ ID NO: 44866 - protein, 15 aa, Homo sapiens
CQSTDSSGTHRNVLF

SEQ ID NO: 44867 - protein, 19 aa, Homo sapiens
CARWGRDGYNFRYWYFDLW

SEQ ID NO: 44868 - protein, 19 aa, Homo sapiens
CAKDAQGPHYYYYYYMDVW

SEQ ID NO: 44869 - protein, 15 aa, Homo sapiens
CARWDGYSWNYMDFW

SEQ ID NO: 44870 - protein, 17 aa, Homo sapiens
CVRPGPANYVSAYFDSW

SEQ ID NO: 44871 - protein, 20 aa, Homo sapiens
CARDGVLRHFDDFYYYIDVW

SEQ ID NO: 44872 - protein, 17 aa, Homo sapiens
CARGGVGATPPGLVDYW

SEQ ID NO: 44873 - protein, 25 aa, Homo sapiens
CTKDHYQFYCSGGRCYSRGAWFDPW

SEQ ID NO: 44874 - protein, 14 aa, Homo sapiens
CQSYDTYLSGSRLF

SEQ ID NO: 44875 - protein, 17 aa, Homo sapiens
CASPLWAAAGTGYFNFW

SEQ ID NO: 44876 - protein, 20 aa, Homo sapiens
CARLPGTAMANVYYYYMDVW

SEQ ID NO: 44877 - protein, 16 aa, Homo sapiens
CAREVATGYPYYYDFW

SEQ ID NO: 44878 - protein, 19 aa, Homo sapiens
CARNRAELWAGLGDAFEVW

SEQ ID NO: 44879 - protein, 23 aa, Homo sapiens
CAKDGGIIVPPGTPPYYVYMDVW

SEQ ID NO: 44880 - protein, 18 aa, Homo sapiens
CVKDRSGQLASNDAFDIW

SEQ ID NO: 44881 - protein, 21 aa, Homo sapiens
CARDPGQAEIVGTIGVYFDSW

SEQ ID NO: 44882 - protein, 11 aa, Homo sapiens [sequence omitted]

SEQ ID NO: 44883 - protein, 18 aa, Homo sapiens
CARLTNGREGALNTFDMW

SEQ ID NO: 44884 - protein, 27 aa, Homo sapiens
CARRVAGMGAWSSFGSTGYHYYYMDVW

SEQ ID NO: 44885 - protein, 17 aa, Homo sapiens
CARASDVVSTPGYSDFW

SEQ ID NO: 44886 - protein, 17 aa, Homo sapiens
CARHAGGYDWGNAFDSW

SEQ ID NO: 44887 - protein, 24 aa, Homo sapiens
CAGSMMITVGAVLTHKSGKWFAPW

SEQ ID NO: 44888 - protein, 20 aa, Homo sapiens
CVGDQTFYSDGSADHQGDYW

SEQ ID NO: 44889 - protein, 19 aa, Homo sapiens
CATPTPTYSSYRKYYFDYW

SEQ ID NO: 44890 - protein, 24 aa, Homo sapiens
CARDLEDGLSFGLRHYYYYYMDVW

SEQ ID NO: 44891 - protein, 17 aa, Homo sapiens
CGSGYYYDSRGSVFDYW

SEQ ID NO: 44892 - protein, 19 aa, Homo sapiens
CARDFYDILAGYSQDFDYW

SEQ ID NO: 44893 - protein, 21 aa, Homo sapiens
CARPNIYDSSGYYGYEAFDLW

SEQ ID NO: 44894 - protein, 18 aa, Homo sapiens
CARQASYDYDNNGPFDIW

SEQ ID NO: 44895 - protein, 23 aa, Homo sapiens
CARGKFGPTYYNILTSYRWLDPW

SEQ ID NO: 44896 - protein, 22 aa, Homo sapiens
CARDPDPGYGYENRGYYFFDYW

SEQ ID NO: 44897 - protein, 17 aa, Homo sapiens
CAREPYRKVVLGYFHHW

SEQ ID NO: 44898 - protein, 18 aa, Homo sapiens
CVRQGEQWFGELVAFDPW

SEQ ID NO: 44899 - protein, 11 aa, Homo sapiens
CVKGRFYLDYW

SEQ ID NO: 44900 - protein, 26 aa, Homo sapiens
CAGGVLIHPSMLTVTPGSYYYYMDVW

SEQ ID NO: 44901 - protein, 18 aa, Homo sapiens
CARGGITTVPWQNWFAPW

SEQ ID NO: 44902 - protein, 19 aa, Homo sapiens
CARTAYGDYGMGLVYLDYW

SEQ ID NO: 44903 - protein, 15 aa, Homo sapiens
CAALVVGSTGDFDHW

SEQ ID NO: 44904 - protein, 21 aa, Homo sapiens
CARHPRPEVFYGSGSGEFDYW

SEQ ID NO: 44905 - protein, 14 aa, Homo sapiens
CARMNGSGRHNDYW

SEQ ID NO: 44906 - protein, 18 aa, Homo sapiens
CARDSLQFLEWLPGFDPW

SEQ ID NO: 44907 - protein, 18 aa, Homo sapiens
CARANWIQLWPEYYFDYW

SEQ ID NO: 44908 - protein, 23 aa, Homo sapiens
CAREGFIAASIEARVPLNAFDIW

SEQ ID NO: 44909 - protein, 19 aa, Homo sapiens
CASELHPYDILTGYYFGYW

SEQ ID NO: 44910 - protein, 18 aa, Homo sapiens
CARHSDLFHDDSSAFEYW

SEQ ID NO: 44911 - protein, 17 aa, Homo sapiens
CASSREWELPWGGFDYW

SEQ ID NO: 44912 - protein, 21 aa, Homo sapiens
CARGPHYFDTSGYDADVFDIW

SEQ ID NO: 44913 - protein, 16 aa, Homo sapiens
CARPLRGYSGFDLDYW

SEQ ID NO: 44914 - protein, 16 aa, Homo sapiens
CARDRRGSGTHFFDYW

SEQ ID NO: 44915 - protein, 22 aa, Homo sapiens
CAREITSGSYFVYYYYYYMDVW

SEQ ID NO: 44916 - protein, 21 aa, Homo sapiens
CARIPEITVLGGVFLGYFDNW

SEQ ID NO: 44917 - protein, 13 aa, Homo sapiens
CQSADTNGIHVVF

SEQ ID NO: 44918 - protein, 20 aa, Homo sapiens
CARSGGGKRTPDYYYYMDVW

SEQ ID NO: 44919 - protein, 20 aa, Homo sapiens
CVRASSADSHDTSRWAFDIW

SEQ ID NO: 44920 - protein, 21 aa, Homo sapiens
CARDPDPQPEYSGSYTYFDYW

SEQ ID NO: 44921 - protein, 21 aa, Homo sapiens
CATSDPGRLVGTILSSPFDHW

SEQ ID NO: 44922 - protein, 15 aa, Homo sapiens
CARLSSETYGAFDIW

SEQ ID NO: 44923 - protein, 14 aa, Homo sapiens
CARLRVLPDAFDFW

SEQ ID NO: 44924 - protein, 18 aa, Homo sapiens
CARQTTIVSAGYNWFDPW

SEQ ID NO: 44925 - protein, 14 aa, Homo sapiens
CALRGYTNGRFVYW

SEQ ID NO: 44926 - protein, 17 aa, Homo sapiens
CARDRSDETSHNWFDPW

SEQ ID NO: 44927 - protein, 15 aa, Homo sapiens
CANDYGDYGHYFDYW

SEQ ID NO: 44928 - protein, 19 aa, Homo sapiens
CAVTTDFPESYYYYYMDVW

SEQ ID NO: 44929 - protein, 21 aa, Homo sapiens
CARSRYCSGGSCPDSYYMDVW

SEQ ID NO: 44930 - protein, 23 aa, Homo sapiens
CGRAGGDYDSFTGYYFMRHSDYW

SEQ ID NO: 44931 - protein, 20 aa, Homo sapiens
CAKGPFYSDGRDYNFYMDVW

SEQ ID NO: 44932 - protein, 16 aa, Homo sapiens
CARSGGGSAPTYMDAW

SEQ ID NO: 44933 - protein, 16 aa, Homo sapiens
CAKALFVSGSYYFGSW

SEQ ID NO: 44934 - protein, 25 aa, Homo sapiens
CVRDVADYSSGSYYRGPRSTVGDYW

SEQ ID NO: 44935 - protein, 20 aa, Homo sapiens
CAKDGYCTITTCYPEGFDPW

SEQ ID NO: 44936 - protein, 16 aa, Homo sapiens
CATITYCTYNTCDDYW

SEQ ID NO: 44937 - protein, 16 aa, Homo sapiens
CTKDVASSWFEYFHHW

SEQ ID NO: 44938 - protein, 19 aa, Homo sapiens
CAATGSFFERMYQYYMDVW

SEQ ID NO: 44939 - protein, 14 aa, Homo sapiens
CAKMGMTTHFFDSW

SEQ ID NO: 44940 - protein, 16 aa, Homo sapiens
CAKRVLVSGIENFDLW

SEQ ID NO: 44941 - protein, 15 aa, Homo sapiens
CVSSLGYLNVLLDYW

SEQ ID NO: 44942 - protein, 23 aa, Homo sapiens
CARDIPTYDILTGSIFYFYMDVW

SEQ ID NO: 44943 - protein, 21 aa, Homo sapiens
CARIVQEYYSGSGSYLGFDPW

SEQ ID NO: 44944 - protein, 13 aa, Homo sapiens
CATGNGRYYFDDW

SEQ ID NO: 44945 - protein, 23 aa, Homo sapiens
CARGRQKGFGELLNQFYYYMDVW

SEQ ID NO: 44946 - protein, 19 aa, Homo sapiens
CARGYYDILTGYTGAFDIW

SEQ ID NO: 44947 - protein, 24 aa, Homo sapiens
CAKDSTSITMVRGVIKQYNWFDPW

SEQ ID NO: 44948 - protein, 16 aa, Homo sapiens
CARPRYSGSYYYMDVW

SEQ ID NO: 44949 - protein, 22 aa, Homo sapiens
CARAPYSGTYSAHFLDWYFDLW

SEQ ID NO: 44950 - protein, 22 aa, Homo sapiens
CATFLPIVAVTIGRPWGWFDPW

SEQ ID NO: 44951 - protein, 15 aa, Homo sapiens
CAHTRGVATYGFDFW

SEQ ID NO: 44952 - protein, 20 aa, Homo sapiens
CVRDRVTWFGEMFPHHFDYW

SEQ ID NO: 44953 - protein, 18 aa, Homo sapiens
CVTDPRYRSSSSGFFDSW

SEQ ID NO: 44954 - protein, 21 aa, Homo sapiens
CATAPEGCNSAACFGGWFDSW

SEQ ID NO: 44955 - protein, 15 aa, Homo sapiens
CVRRDGVRDQPFDLW

SEQ ID NO: 44956 - protein, 22 aa, Homo sapiens
CATPPYCSGGSCYFEGEYFQYW

SEQ ID NO: 44957 - protein, 18 aa, Homo sapiens
CAKPDSIAAAADAYFPSW

SEQ ID NO: 44958 - protein, 21 aa, Homo sapiens
CAKDRHPSLAARRRTYYFDYW

SEQ ID NO: 44959 - protein, 19 aa, Homo sapiens
CTTDPYYNSWTGYSVFDNW

SEQ ID NO: 44960 - protein, 15 aa, Homo sapiens
CVRDGIASGADLDYW

SEQ ID NO: 44961 - protein, 18 aa, Homo sapiens
CARGCITIFGEERLFDYW

SEQ ID NO: 44962 - protein, 16 aa, Homo sapiens
CAKLSSYREVVITDYW

SEQ ID NO: 44963 - protein, 23 aa, Homo sapiens
CSRPYYEILTGYFYPYYYYLDVW

SEQ ID NO: 44964 - protein, 17 aa, Homo sapiens
CARHAEYSYQYTYMDVW

SEQ ID NO: 44965 - protein, 15 aa, Homo sapiens
CQSTDISGAYTDVIF

SEQ ID NO: 44966 - protein, 24 aa, Homo sapiens
CAKALVRGVIAYREFKVYPEFDYW

SEQ ID NO: 44967 - protein, 13 aa, Homo sapiens
CLLYYGGTQPWVF

SEQ ID NO: 44968 - protein, 24 aa, Homo sapiens
CASGGNYYYDSRGSVLDYGYFDLW

SEQ ID NO: 44969 - protein, 19 aa, Homo sapiens
CARGNDDFLTGYPYYFDFW

SEQ ID NO: 44970 - protein, 20 aa, Homo sapiens
CAKDPWELRLYEGIDWFDPW

SEQ ID NO: 44971 - protein, 25 aa, Homo sapiens
CARTRAPYYDILTGSGGPPYYFDSW

SEQ ID NO: 44972 - protein, 15 aa, Homo sapiens
CTRDGPGIYYKFDYW

SEQ ID NO: 44973 - protein, 21 aa, Homo sapiens
CARGTYYFDTRGYRSWNFDLW

SEQ ID NO: 44974 - protein, 21 aa, Homo sapiens
CTRGPPMSRARGSYYFYMDVW

SEQ ID NO: 44975 - protein, 11 aa, Homo sapiens
CVRGSVYFDSW

SEQ ID NO: 44976 - protein, 18 aa, Homo sapiens
CVRGGGTTRRGIPPFEYW

SEQ ID NO: 44977 - protein, 20 aa, Homo sapiens
CARDRSDYYGSGSPGYIDLW

SEQ ID NO: 44978 - protein, 19 aa, Homo sapiens
CARDPRYCSGGPCYSFDYW

SEQ ID NO: 44979 - protein, 17 aa, Homo sapiens
CARDLERVGPRSYMDVW

SEQ ID NO: 44980 - protein, 20 aa, Homo sapiens
CARHGDYYDILTGSGLFDYW

SEQ ID NO: 44981 - protein, 18 aa, Homo sapiens
CARVGAFGHLTEYYFDYW

SEQ ID NO: 44982 - protein, 18 aa, Homo sapiens
CAKDRAAYGSGWNFFDFW

SEQ ID NO: 44983 - protein, 13 aa, Homo sapiens
CARAVYGGYFNYW

SEQ ID NO: 44984 - protein, 18 aa, Homo sapiens
CARSYYDILTGYSAFDYW

SEQ ID NO: 44985 - protein, 18 aa, Homo sapiens
CVSSYSSSWSISGKFDYW

SEQ ID NO: 44986 - protein, 16 aa, Homo sapiens
CARLTVGGTGVLFDPW

SEQ ID NO: 44987 - protein, 16 aa, Homo sapiens
CAKDISKSYFYYFDYW

SEQ ID NO: 44988 - protein, 14 aa, Homo sapiens
CVSGTPREWYFHLW

SEQ ID NO: 44989 - protein, 21 aa, Homo sapiens
CAKTAPSSYANGGFDAYFDIW

SEQ ID NO: 44990 - protein, 19 aa, Homo sapiens
CVKGESYDVVTGSYYFDHW

SEQ ID NO: 44991 - protein, 19 aa, Homo sapiens
CVRPYGDNEGYYYYYMDVW

SEQ ID NO: 44992 - protein, 15 aa, Homo sapiens
CARRPRDSSGYIGYW

SEQ ID NO: 44993 - protein, 13 aa, Homo sapiens
CQTFNRYPHAITF

SEQ ID NO: 44994 - protein, 17 aa, Homo sapiens
CAREGVAAAVDDAFDFW

SEQ ID NO: 44995 - protein, 19 aa, Homo sapiens
CARQRVGATFLPSRYFDLW

SEQ ID NO: 44996 - protein, 24 aa, Homo sapiens
CAISMSRRMAVTSKGKPIGWFDPW

SEQ ID NO: 44997 - protein, 19 aa, Homo sapiens
CERAHLAYSYGYFTYIDSW

SEQ ID NO: 44998 - protein, 23 aa, Homo sapiens
CAREGGTVGTTVQVIRHWYFDLW

SEQ ID NO: 44999 - protein, 21 aa, Homo sapiens
CARWAPSYKHDSSAYYNFDDW

SEQ ID NO: 45000 - protein, 18 aa, Homo sapiens
CASSLDMATVWHDAFDMW

SEQ ID NO: 45001 - protein, 17 aa, Homo sapiens
CARARRAYSYASDFDYW

SEQ ID NO: 45002 - protein, 26 aa, Homo sapiens
CAHRKDLDQQFYVQSGYYYNNFFDFW

SEQ ID NO: 45003 - protein, 17 aa, Homo sapiens
CAKSPYYDSSGHPVDYW

SEQ ID NO: 45004 - protein, 21 aa, Homo sapiens
CARQFEDFDSGGNMLYYFDYW

SEQ ID NO: 45005 - protein, 18 aa, Homo sapiens
CARQYSTSWYQPDYFDNW

SEQ ID NO: 45006 - protein, 22 aa, Homo sapiens
CARDRKEYCSGSSCIYYYMDVW

SEQ ID NO: 45007 - protein, 19 aa, Homo sapiens
CARAAYCGDDCYFGWFDPW

SEQ ID NO: 45008 - protein, 17 aa, Homo sapiens
CAKALSWNYDRNYFDPW

SEQ ID NO: 45009 - protein, 15 aa, Homo sapiens
CAKQYWFGNDYFDYW

SEQ ID NO: 45010 - protein, 17 aa, Homo sapiens
CARYSRAFKTYWHFDLW

SEQ ID NO: 45011 - protein, 21 aa, Homo sapiens
CARLGDDYVWGNYRRYFFDYW

SEQ ID NO: 45012 - protein, 23 aa, Homo sapiens
CTTEVGNFNFWTGYYKADGFDYW

SEQ ID NO: 45013 - protein, 20 aa, Homo sapiens
CARQDLVPKGADMGMKFDFW

SEQ ID NO: 45014 - protein, 24 aa, Homo sapiens
CARDPITGSYCNNIRCYNNWFDPW

SEQ ID NO: 45015 - protein, 16 aa, Homo sapiens
CARPRGVSSRNAFDIW

SEQ ID NO: 45016 - protein, 18 aa, Homo sapiens
CARTRSYFGSGISVFDYW

SEQ ID NO: 45017 - protein, 15 aa, Homo sapiens
CATEKSMGPSDFDFW

SEQ ID NO: 45018 - protein, 18 aa, Homo sapiens
CAKDSIAWGSGTYVLDYW

SEQ ID NO: 45019 - protein, 31 aa, Homo sapiens
CVRYRWDSSTGYYLSVTRPQESHYYDHMDVW

SEQ ID NO: 45020 - protein, 19 aa, Homo sapiens
CARVTGSSGWYKYEYFQHW

SEQ ID NO: 45021 - protein, 19 aa, Homo sapiens
CARQPSGWSYYHYFYMDAW

SEQ ID NO: 45022 - protein, 19 aa, Homo sapiens
CARGFEGRYEVFHGVFDFW

SEQ ID NO: 45023 - protein, 17 aa, Homo sapiens
CATEERLTGTSLWVDPW

SEQ ID NO: 45024 - protein, 24 aa, Homo sapiens
CARGIASFREYSGYDSNYYYMDVW

SEQ ID NO: 45025 - protein, 22 aa, Homo sapiens
CARTYYYGSGSYNYHYYYMDVW

SEQ ID NO: 45026 - protein, 15 aa, Homo sapiens
CASEIAVTGTAFDYW

SEQ ID NO: 45027 - protein, 19 aa, Homo sapiens
CASARDQIAAARYYYMDVW

SEQ ID NO: 45028 - protein, 18 aa, Homo sapiens
CARVWAPYTGNYEAIDYW

SEQ ID NO: 45029 - protein, 17 aa, Homo sapiens
CARDLGSYREMRAFDIW

SEQ ID NO: 45030 - protein, 15 aa, Homo sapiens
CARRWQVLPRLFDFW

SEQ ID NO: 45031 - protein, 20 aa, Homo sapiens
CAKDSGFTSGWYGRHAFHVW

SEQ ID NO: 45032 - protein, 17 aa, Homo sapiens
CARARYNSGSYGYFDYW

SEQ ID NO: 45033 - protein, 17 aa, Homo sapiens
CARDFLRGYNYGYFDYW

SEQ ID NO: 45034 - protein, 16 aa, Homo sapiens
CARHFGEILAEYFQHW

SEQ ID NO: 45035 - protein, 18 aa, Homo sapiens
CARDQALHSTGYNPFDYW

SEQ ID NO: 45036 - protein, 18 aa, Homo sapiens
CAAQLVGTTQGHWYFDLW

SEQ ID NO: 45037 - protein, 14 aa, Homo sapiens
CAKYHYGLNAFDIW

SEQ ID NO: 45038 - protein, 21 aa, Homo sapiens
CARGDLQWYYATYYSKPFDLW

SEQ ID NO: 45039 - protein, 18 aa, Homo sapiens
CARVPVFSYYYYYYMDVW

SEQ ID NO: 45040 - protein, 18 aa, Homo sapiens
CAKTWGGSWYGKYYFDSW

SEQ ID NO: 45041 - protein, 18 aa, Homo sapiens
CARGTWFGNNWNWVFDYW

SEQ ID NO: 45042 - protein, 24 aa, Homo sapiens
CARSGYYGSGTYYNADYYYYMDVW

SEQ ID NO: 45043 - protein, 17 aa, Homo sapiens
CATGPSLYTVVKRFDYW

SEQ ID NO: 45044 - protein, 15 aa, Homo sapiens
CAKGGGYNNGYTDYW

SEQ ID NO: 45045 - protein, 13 aa, Homo sapiens
CALVGVAESFDYW

SEQ ID NO: 45046 - protein, 13 aa, Homo sapiens
CVRGFIGGPFDSW

SEQ ID NO: 45047 - protein, 17 aa, Homo sapiens
CARNFDWFDKADAFDIW

SEQ ID NO: 45048 - protein, 20 aa, Homo sapiens
CARDPSLGDYSDTSGYCDYW

SEQ ID NO: 45049 - protein, 20 aa, Homo sapiens
CARERYDILTGYREYSLDYW

SEQ ID NO: 45050 - protein, 22 aa, Homo sapiens
CAKGEASVLNDYASGSYAFDYW

SEQ ID NO: 45051 - protein, 20 aa, Homo sapiens
CARNSYGSGSYYGRDSFDIW

SEQ ID NO: 45052 - protein, 18 aa, Homo sapiens
CARSRITIFREFHPLDYW

SEQ ID NO: 45053 - protein, 22 aa, Homo sapiens
CAKEGTPSYGSRRHYYYYMDVW

SEQ ID NO: 45054 - protein, 17 aa, Homo sapiens
CAKSHAVTMVYYYMDVW

SEQ ID NO: 45055 - protein, 20 aa, Homo sapiens
CARDGCRGGSCYRAEYFQLW

SEQ ID NO: 45056 - protein, 20 aa, Homo sapiens
CARDCTGITMFREFNAFDIW

SEQ ID NO: 45057 - protein, 19 aa, Homo sapiens
CAKDLFSREVAVINHFDSW

SEQ ID NO: 45058 - protein, 19 aa, Homo sapiens
CAHLPRGNSLSRKNWFDPW

SEQ ID NO: 45059 - protein, 24 aa, Homo sapiens
CARLRLGRYYSDSGNLPYWFFDLW

SEQ ID NO: 45060 - protein, 16 aa, Homo sapiens
CATLNMVRGIYYMDVW

SEQ ID NO: 45061 - protein, 20 aa, Homo sapiens
CAKDLAEYNFWSGAYAFHIW

SEQ ID NO: 45062 - protein, 16 aa, Homo sapiens
CARTSNWAQGGYMDVW

SEQ ID NO: 45063 - protein, 16 aa, Homo sapiens
CASHYRGNRNNWFDSW

SEQ ID NO: 45064 - protein, 21 aa, Homo sapiens
CARGSSSGWYQYYYYYYMDVW

SEQ ID NO: 45065 - protein, 24 aa, Homo sapiens
CAKEHRGAAIQLWFSYYYYYMDVW

SEQ ID NO: 45066 - protein, 16 aa, Homo sapiens
CARVDKSVGGTHFAYW

SEQ ID NO: 45067 - protein, 24 aa, Homo sapiens
CARAPLLQFLEWLGAKIPGAFDIW

SEQ ID NO: 45068 - protein, 16 aa, Homo sapiens
CATDFAYSRNDFVDYW

SEQ ID NO: 45069 - protein, 21 aa, Homo sapiens
CARPPPSFYDILAGGSYFDYW

SEQ ID NO: 45070 - protein, 17 aa, Homo sapiens
CARGSPLVPLFITIDYW

SEQ ID NO: 45071 - protein, 23 aa, Homo sapiens
CARVTYYDILTGHDHHYWYFDLW

SEQ ID NO: 45072 - protein, 18 aa, Homo sapiens
CAKDPYDTYGYYYYFDYW

SEQ ID NO: 45073 - protein, 18 aa, Homo sapiens
CARQKGSGSYYMNSFDYW

SEQ ID NO: 45074 - protein, 19 aa, Homo sapiens
CAKDMSLDNWNDGGAFDIW

SEQ ID NO: 45075 - protein, 20 aa, Homo sapiens
CAREILTHNLWSEYSAFDLW

SEQ ID NO: 45076 - protein, 17 aa, Homo sapiens
CSRDGPGMGELGAFDYW

SEQ ID NO: 45077 - protein, 27 aa, Homo sapiens
CARRVRCSSTSCYAGGQRGEDDAFDIW

SEQ ID NO: 45078 - protein, 20 aa, Homo sapiens
CARDAKDYVWGSYRYGADYW

SEQ ID NO: 45079 - protein, 13 aa, Homo sapiens
CQQSDNNLPIFTF

SEQ ID NO: 45080 - protein, 26 aa, Homo sapiens
CAKGNRKGVRLWWIEEEEGEYYFDYW

SEQ ID NO: 45081 - protein, 12 aa, Homo sapiens
CARTGDSLRDYW

SEQ ID NO: 45082 - protein, 19 aa, Homo sapiens
CAKVGDYYDSSGYYHPDYW

SEQ ID NO: 45083 - protein, 24 aa, Homo sapiens
CARNSHYFDTSGYFQYYYYYMDVW

SEQ ID NO: 45084 - protein, 16 aa, Homo sapiens
CVRDYSGGYWGRFDNW

SEQ ID NO: 45085 - protein, 19 aa, Homo sapiens
CATLYLYSGRWHNWYFDLW

SEQ ID NO: 45086 - protein, 23 aa, Homo sapiens
CAKDRGTIFGVSAVREWNFFDSW

SEQ ID NO: 45087 - protein, 18 aa, Homo sapiens
CARDHGRDDDYVNWFGPW

SEQ ID NO: 45088 - protein, 19 aa, Homo sapiens
CAKDRVGYYYGSGSSADYW

SEQ ID NO: 45089 - protein, 12 aa, Homo sapiens
CQQSYTTPLITF

SEQ ID NO: 45090 - protein, 15 aa, Homo sapiens
CARGREGWSAPEDYW

SEQ ID NO: 45091 - protein, 18 aa, Homo sapiens
CARRYYSGSHYPSFFDSW

SEQ ID NO: 45092 - protein, 22 aa, Homo sapiens
CARGHDSSEDGTRLGHYYMDVW

SEQ ID NO: 45093 - protein, 13 aa, Homo sapiens
CQYYNIAPPVFSF

SEQ ID NO: 45094 - protein, 16 aa, Homo sapiens
CARDRGNNYGFGFDIW

SEQ ID NO: 45095 - protein, 16 aa, Homo sapiens
CARDAATTNNNWFDPW

SEQ ID NO: 45096 - protein, 19 aa, Homo sapiens
CAKDLNEFVVVTAVEFDYW

SEQ ID NO: 45097 - protein, 21 aa, Homo sapiens
CARQGVLVSERVYVSGAFDVW

SEQ ID NO: 45098 - protein, 24 aa, Homo sapiens
CARLEKFGSGISGQGFYYYYMDVW

SEQ ID NO: 45099 - protein, 19 aa, Homo sapiens
CTSRFIVVVPAAKWVRDYW

SEQ ID NO: 45100 - protein, 17 aa, Homo sapiens
CARYGSGSDYKDPFDYW

SEQ ID NO: 45101 - protein, 25 aa, Homo sapiens
CARHVPYVSMLLVVAATPPHYFDYW

SEQ ID NO: 45102 - protein, 16 aa, Homo sapiens
CAHSVFYYDSARFDPW

SEQ ID NO: 45103 - protein, 12 aa, Homo sapiens
CARSVSYELDYW

SEQ ID NO: 45104 - protein, 16 aa, Homo sapiens
CARISVGSGSNFFDYW

SEQ ID NO: 45105 - protein, 23 aa, Homo sapiens
CARGPVCSRTSCLWYYYYYLDVW

SEQ ID NO: 45106 - protein, 19 aa, Homo sapiens
CAKERIVGASVGNAAFDIW

SEQ ID NO: 45107 - protein, 15 aa, Homo sapiens
CARGMRQLVGTFDYW

SEQ ID NO: 45108 - protein, 17 aa, Homo sapiens
CTKDIYLTVGGTYFDYW

SEQ ID NO: 45109 - protein, 10 aa, Homo sapiens
CQQRSNEDTF

SEQ ID NO: 45110 - protein, 19 aa, Homo sapiens
CARPGGGTAVSGTNWFGPW

SEQ ID NO: 45111 - protein, 24 aa, Homo sapiens
CATEMERSDAYFYDGRRSAQFDYW

SEQ ID NO: 45112 - protein, 17 aa, Homo sapiens
CARLGGRPRVDGGLDYW

SEQ ID NO: 45113 - protein, 20 aa, Homo sapiens
CARASTVTNYYYYYYYMDVW

SEQ ID NO: 45114 - protein, 20 aa, Homo sapiens
CARDTLYDYLWGSYREFDYW

SEQ ID NO: 45115 - protein, 18 aa, Homo sapiens
CVKDKVEYDNRPYAFDYW

SEQ ID NO: 45116 - protein, 24 aa, Homo sapiens
CARVGGVSEYSNFKSYYYYYMDVW

SEQ ID NO: 45117 - protein, 16 aa, Homo sapiens
CAIDTIAPRRGGFDSW

SEQ ID NO: 45118 - protein, 15 aa, Homo sapiens
CAKGQFLVRDPFDPW

SEQ ID NO: 45119 - protein, 24 aa, Homo sapiens
CARAHSPYLYGSGNIYNWVWFDPW

SEQ ID NO: 45120 - protein, 14 aa, Homo sapiens
CQSSDSGGVPGVQF

SEQ ID NO: 45121 - protein, 22 aa, Homo sapiens
CARAGHDCSGGSCYSYWYFDLW

SEQ ID NO: 45122 - protein, 24 aa, Homo sapiens
CARARLGIGYDYDSGSWNYYFDYW

SEQ ID NO: 45123 - protein, 13 aa, Homo sapiens
CQQYNTWPPDSGF

SEQ ID NO: 45124 - protein, 21 aa, Homo sapiens
CARDLHFGTTVPPRPRNFDLW

SEQ ID NO: 45125 - protein, 25 aa, Homo sapiens
CARASSTYYFDSRGPYYGVDAFDLW

SEQ ID NO: 45126 - protein, 20 aa, Homo sapiens
CARSQYYSDSSGYMSYFDLW

SEQ ID NO: 45127 - protein, 19 aa, Homo sapiens
CATLLVSSGWPKDHPFDIW

SEQ ID NO: 45128 - protein, 20 aa, Homo sapiens
CAKAIRYYDSSGYYSDFDDW

SEQ ID NO: 45129 - protein, 12 aa, Homo sapiens
CARISGWGRDYW

SEQ ID NO: 45130 - protein, 18 aa, Homo sapiens
CARVGSVGYDGGFYFDSW

SEQ ID NO: 45131 - protein, 12 aa, Homo sapiens
CQSEDISGIPVF

SEQ ID NO: 45132 - protein, 18 aa, Homo sapiens
CARLEAHYYDSSGLVDYW

SEQ ID NO: 45133 - protein, 18 aa, Homo sapiens
CAKDRVRYNWNYDAFDVW

SEQ ID NO: 45134 - protein, 13 aa, Homo sapiens
CARQVGSTRLDYW

SEQ ID NO: 45135 - protein, 14 aa, Homo sapiens
CAKGGGSVNDIDYW

SEQ ID NO: 45136 - protein, 19 aa, Homo sapiens
CARIVTTDIYASSGYHDYW

SEQ ID NO: 45137 - protein, 18 aa, Homo sapiens
CARDFGSSGYYTEAFDIW

SEQ ID NO: 45138 - protein, 16 aa, Homo sapiens
CARDALVSSGWYALYW

SEQ ID NO: 45139 - protein, 18 aa, Homo sapiens
CARMPGVGVAGRDACDIW

SEQ ID NO: 45140 - protein, 22 aa, Homo sapiens
CARQDGGLWYYDDSGYYYFDYW

SEQ ID NO: 45141 - protein, 18 aa, Homo sapiens
CAGTILGVVIHFDYMDVW

SEQ ID NO: 45142 - protein, 17 aa, Homo sapiens
CAKDPGRTGMTGWFDPW

SEQ ID NO: 45143 - protein, 22 aa, Homo sapiens
CAKDHRVASVYVVTITGYFQHW

SEQ ID NO: 45144 - protein, 18 aa, Homo sapiens
CARGRSNSWYRGGWFDPW

SEQ ID NO: 45145 - protein, 17 aa, Homo sapiens
CGSGYFDSSGYPLFDYW

SEQ ID NO: 45146 - protein, 29 aa, Homo sapiens
CATAQRRLSDIASAGWDLFTYYYYYMDVW

SEQ ID NO: 45147 - protein, 20 aa, Homo sapiens
CARRGYDIFTGYMGDYFDYW

SEQ ID NO: 45148 - protein, 16 aa, Homo sapiens
CAKDLFTGGWYYFDSW

SEQ ID NO: 45149 - protein, 23 aa, Homo sapiens
CAKHIRSGPGSAGTHYYYYMDVW

SEQ ID NO: 45150 - protein, 14 aa, Homo sapiens
CAHRRWESDAFDIW

SEQ ID NO: 45151 - protein, 16 aa, Homo sapiens
CAKDGQPGSGWYFDYW

SEQ ID NO: 45152 - protein, 19 aa, Homo sapiens
CARETFIRWLQLLYYMDVW

SEQ ID NO: 45153 - protein, 19 aa, Homo sapiens
CARGLYLYTSGSPGWFDPW

SEQ ID NO: 45154 - protein, 17 aa, Homo sapiens
CARDQETVVENWYFDLW

SEQ ID NO: 45155 - protein, 20 aa, Homo sapiens
CARPFVDLWSDYYSNWFDPW

SEQ ID NO: 45156 - protein, 18 aa, Homo sapiens
CAKNFAGSGWYKSWFEPW

SEQ ID NO: 45157 - protein, 17 aa, Homo sapiens
CARHHHIAAAHNWFDPW

SEQ ID NO: 45158 - protein, 15 aa, Homo sapiens
CAREPRDGYNRFDFW

SEQ ID NO: 45159 - protein, 25 aa, Homo sapiens
CARDQMAGGLGRFGPGIYKNVFDKW

SEQ ID NO: 45160 - protein, 12 aa, Homo sapiens
CTRDISGYCDWW

SEQ ID NO: 45161 - protein, 23 aa, Homo sapiens
CASPSRSTSPSGGYYDHDAFDIW

SEQ ID NO: 45162 - protein, 17 aa, Homo sapiens
CARPSGNYWGYNYFDPW

SEQ ID NO: 45163 - protein, 18 aa, Homo sapiens
CARHDHTGTYYGDAFDLW

SEQ ID NO: 45164 - protein, 22 aa, Homo sapiens
CARNPLKTGTGIYNYFYYMDVW

SEQ ID NO: 45165 - protein, 19 aa, Homo sapiens
CAKDRVFLQSFGQFVFDYW

SEQ ID NO: 45166 - protein, 18 aa, Homo sapiens
CAKDWRAVDYDGSAFDYW

SEQ ID NO: 45167 - protein, 18 aa, Homo sapiens
CARSRDILTGYYGAFDFW

SEQ ID NO: 45168 - protein, 17 aa, Homo sapiens
CTRDRVLSGKVIHFDYW

SEQ ID NO: 45169 - protein, 15 aa, Homo sapiens
CARSGYDDADYFDSW

SEQ ID NO: 45170 - protein, 15 aa, Homo sapiens
CATYDAIKGGWFDPW

SEQ ID NO: 45171 - protein, 17 aa, Homo sapiens
CATFYSGRGVNDAFDIW

SEQ ID NO: 45172 - protein, 22 aa, Homo sapiens
CARTVVSMTVVLITRAYYFDHW

SEQ ID NO: 45173 - protein, 15 aa, Homo sapiens
CATLGHKAGWKFDYW

SEQ ID NO: 45174 - protein, 22 aa, Homo sapiens
CAREYGGYGSGSYYIGGAFDIW

SEQ ID NO: 45175 - protein, 15 aa, Homo sapiens
CARADHYVRYSFDYW

SEQ ID NO: 45176 - protein, 22 aa, Homo sapiens
CARSSSRITMIVVVITSYMDVW

SEQ ID NO: 45177 - protein, 17 aa, Homo sapiens
CATLTHSGTYQEAFDYW

SEQ ID NO: 45178 - protein, 16 aa, Homo sapiens
CARAPRPYYYYYMDVW

SEQ ID NO: 45179 - protein, 13 aa, Homo sapiens
CARDTSDFLFDPW

SEQ ID NO: 45180 - protein, 17 aa, Homo sapiens
CARDEASLGTTVTFDYW

SEQ ID NO: 45181 - protein, 19 aa, Homo sapiens
CARATSGDGDYFPYYMDVW

SEQ ID NO: 45182 - protein, 19 aa, Homo sapiens
CVHRQEAYSTSSWFHFDYW

SEQ ID NO: 45183 - protein, 17 aa, Homo sapiens
CARVGTSGWYYYYMDVW

SEQ ID NO: 45184 - protein, 16 aa, Homo sapiens
CTADLPDYGPYDFDYW

SEQ ID NO: 45185 - protein, 16 aa, Homo sapiens
CARLVGSGSYSYFDYW

SEQ ID NO: 45186 - protein, 16 aa, Homo sapiens
CAKSGYGPIYWYLDPW

SEQ ID NO: 45187 - protein, 16 aa, Homo sapiens
CAREGSGWLYDWFDPW

SEQ ID NO: 45188 - protein, 15 aa, Homo sapiens
CAKDLLRSSDEFDYW

SEQ ID NO: 45189 - protein, 21 aa, Homo sapiens
CARISGSGSYSGPITYYFDYW

SEQ ID NO: 45190 - protein, 17 aa, Homo sapiens
CARHGVEYFAASAFDLW

SEQ ID NO: 45191 - protein, 15 aa, Homo sapiens
CARSTTTGHDPFDIW

SEQ ID NO: 45192 - protein, 20 aa, Homo sapiens
CARFIAAAGLVYYYYYMDVW

SEQ ID NO: 45193 - protein, 18 aa, Homo sapiens
CAKGAYNYGHGGEYFHHW

SEQ ID NO: 45194 - protein, 14 aa, Homo sapiens
CARAITIIEPLDYW

SEQ ID NO: 45195 - protein, 17 aa, Homo sapiens
CGRVQLTAGPEPYNDYW

SEQ ID NO: 45196 - protein, 20 aa, Homo sapiens
CATAARNLGIVGVRRWFDPW

SEQ ID NO: 45197 - protein, 14 aa, Homo sapiens
CNSRDSSSNQDVLF

SEQ ID NO: 45198 - protein, 16 aa, Homo sapiens
CARSHYYGSASYIDYW

SEQ ID NO: 45199 - protein, 22 aa, Homo sapiens
CVKSSSSYYDILTGYNGWFDPW

SEQ ID NO: 45200 - protein, 16 aa, Homo sapiens
CHTDYYYDHSGPLDYW

SEQ ID NO: 45201 - protein, 14 aa, Homo sapiens
CARHRNGYNPLDYW

SEQ ID NO: 45202 - protein, 16 aa, Homo sapiens
CAKRANWGSIDAFDIW

SEQ ID NO: 45203 - protein, 20 aa, Homo sapiens
CAKTSGYYVNSGYPYYFDYW

SEQ ID NO: 45204 - protein, 16 aa, Homo sapiens
CATNGGNYFYDYMDVW

SEQ ID NO: 45205 - protein, 15 aa, Homo sapiens
CAKNHVESAGCFDFW

SEQ ID NO: 45206 - protein, 15 aa, Homo sapiens
CARGGLLTGSGFDYW

SEQ ID NO: 45207 - protein, 17 aa, Homo sapiens
CARRPYGDHFLYYFDYW

SEQ ID NO: 45208 - protein, 15 aa, Homo sapiens
CAESDRDGDYPFDRW

SEQ ID NO: 45209 - protein, 12 aa, Homo sapiens
CQQYYSYWGWTF

SEQ ID NO: 45210 - protein, 16 aa, Homo sapiens
CAKDMSSMSQGWLDPW

SEQ ID NO: 45211 - protein, 23 aa, Homo sapiens
CAKAMKDYYESGGYYPLHYIDYW

SEQ ID NO: 45212 - protein, 23 aa, Homo sapiens
CARLGEVYDNFWGSHKGGYFDFW

SEQ ID NO: 45213 - protein, 18 aa, Homo sapiens
CTRDREDYDSSGYYSDYW

SEQ ID NO: 45214 - protein, 22 aa, Homo sapiens
CARLKYYDSIWGSYRSPFFDYW

SEQ ID NO: 45215 - protein, 17 aa, Homo sapiens
CAKDGFKYFDGYYFDYW

SEQ ID NO: 45216 - protein, 16 aa, Homo sapiens
CGRQYSSGWYHALDIW

SEQ ID NO: 45217 - protein, 23 aa, Homo sapiens
CARHSFRSCTSTFCDSYDWFAPW

SEQ ID NO: 45218 - protein, 16 aa, Homo sapiens
CAIDHASGSYYPTDYW

SEQ ID NO: 45219 - protein, 17 aa, Homo sapiens
CARGHKGVSGWYLVDYW

SEQ ID NO: 45220 - protein, 23 aa, Homo sapiens
CTRHMVPGYCSAGSCYNEAFDIW

SEQ ID NO: 45221 - protein, 19 aa, Homo sapiens
CVRDKRDYYGSESPPFEYW

SEQ ID NO: 45222 - protein, 16 aa, Homo sapiens
CAKVTAIWSGYYEDYW

SEQ ID NO: 45223 - protein, 21 aa, Homo sapiens
CARDNHYYDSSGYYDYYMDVW

SEQ ID NO: 45224 - protein, 22 aa, Homo sapiens
CVRPRRYDGNDYYSQEDAFDIW

SEQ ID NO: 45225 - protein, 17 aa, Homo sapiens
CAREEGDGYDFGHIDYW

SEQ ID NO: 45226 - protein, 15 aa, Homo sapiens
CARDARPQFWAFDIW

SEQ ID NO: 45227 - protein, 19 aa, Homo sapiens
CARIGDTMFRVYHYYMDVW

SEQ ID NO: 45228 - protein, 18 aa, Homo sapiens
CARLGVNRYSNSWYGVYW

SEQ ID NO: 45229 - protein, 25 aa, Homo sapiens
CARDGEYCSTFSCYLFYGYYYMDVW

SEQ ID NO: 45230 - protein, 21 aa, Homo sapiens
CARGAFYYDNSGYRRMTFDIW

SEQ ID NO: 45231 - protein, 18 aa, Homo sapiens
CASSFSPYGSGGDAFDFW

SEQ ID NO: 45232 - protein, 18 aa, Homo sapiens
CAKGIRGSGYDSPSFDVW

SEQ ID NO: 45233 - protein, 20 aa, Homo sapiens
CARLSRATRAYSDYVEIDYW

SEQ ID NO: 45234 - protein, 19 aa, Homo sapiens
CAKVRGGSGTYYYYYMDVW

SEQ ID NO: 45235 - protein, 15 aa, Homo sapiens
CAGSAATTAYYIDYW

SEQ ID NO: 45236 - protein, 18 aa, Homo sapiens
CARDTQYSGGWYVSADYW

SEQ ID NO: 45237 - protein, 16 aa, Homo sapiens
CARLDYAYNHNWFDSW

SEQ ID NO: 45238 - protein, 17 aa, Homo sapiens
CAKAGGSCHHCNWFDPW

SEQ ID NO: 45239 - protein, 18 aa, Homo sapiens
CAKPSFSADGGGYQLDYW

SEQ ID NO: 45240 - protein, 20 aa, Homo sapiens
CAGSSAGSCFSCYYFYMDVW

SEQ ID NO: 45241 - protein, 18 aa, Homo sapiens
CARLPGYRSGSNYPFDNW

SEQ ID NO: 45242 - protein, 15 aa, Homo sapiens
CVGDTWELMGAFDLW

SEQ ID NO: 45243 - protein, 14 aa, Homo sapiens
CARDWGTSLYFDFW

SEQ ID NO: 45244 - protein, 19 aa, Homo sapiens
CARAVSSSLYYYYYYMDVW

SEQ ID NO: 45245 - protein, 20 aa, Homo sapiens
CAKDFYDILTPYYNSPFDSW

SEQ ID NO: 45246 - protein, 23 aa, Homo sapiens
CAKESGRTYYNFWSPDYYYMDVW

SEQ ID NO: 45247 - protein, 16 aa, Homo sapiens
CARGTGIIVQRAFDYW

SEQ ID NO: 45248 - protein, 17 aa, Homo sapiens
CARRHDTMTTSNYFDFW

SEQ ID NO: 45249 - protein, 19 aa, Homo sapiens
CARGRITVDRGVSESFDMW

SEQ ID NO: 45250 - protein, 21 aa, Homo sapiens
CARDRIHTTSAGTDGSYFDSW

SEQ ID NO: 45251 - protein, 15 aa, Homo sapiens
CARDRGVGARWFDYW

SEQ ID NO: 45252 - protein, 19 aa, Homo sapiens
CARQPSQAIAPAGSYFQHW

SEQ ID NO: 45253 - protein, 17 aa, Homo sapiens
CARLHSGDYGMTWFDPW

SEQ ID NO: 45254 - protein, 19 aa, Homo sapiens
CARGSAILTGFLVGPFDSW

SEQ ID NO: 45255 - protein, 19 aa, Homo sapiens
CARQYGRYSSGWYYPLDYW

SEQ ID NO: 45256 - protein, 16 aa, Homo sapiens
CARDPPYDILTLIDYW

SEQ ID NO: 45257 - protein, 17 aa, Homo sapiens
CAREADIVVTSPPFDYW

SEQ ID NO: 45258 - protein, 20 aa, Homo sapiens
CAITRLGRVFGEFTGYFDYW

SEQ ID NO: 45259 - protein, 23 aa, Homo sapiens
CVRGARPYFYESTGYYWGWFDFW

SEQ ID NO: 45260 - protein, 24 aa, Homo sapiens
CARDMRTVFRGILTTLALSYFDPW

SEQ ID NO: 45261 - protein, 12 aa, Homo sapiens
CMQALETPTISF

SEQ ID NO: 45262 - protein, 18 aa, Homo sapiens
CTRLLGDENSGYLGFVYW

SEQ ID NO: 45263 - protein, 14 aa, Homo sapiens
CANLWLVVGAMDYW

SEQ ID NO: 45264 - protein, 17 aa, Homo sapiens
CARDADTNSRYSRFDHW

SEQ ID NO: 45265 - protein, 16 aa, Homo sapiens
CAKKLTTSGYGPFDYW

SEQ ID NO: 45266 - protein, 22 aa, Homo sapiens
CAREPRGLLRSDYYYYHYFDVW

SEQ ID NO: 45267 - protein, 19 aa, Homo sapiens
CNTAAETDYYDTSGYSVYW

SEQ ID NO: 45268 - protein, 17 aa, Homo sapiens
CTRGGILGVTWNWFDPW

SEQ ID NO: 45269 - protein, 22 aa, Homo sapiens
CARDAFKFDWDPFYYYYYMDVW

SEQ ID NO: 45270 - protein, 17 aa, Homo sapiens
CATSGAYFGEFLAMDVW

SEQ ID NO: 45271 - protein, 23 aa, Homo sapiens
CSRGGHPGAYVYGSTSGYYFDYW

SEQ ID NO: 45272 - protein, 14 aa, Homo sapiens [sequence omitted]

SEQ ID NO: 45273 - protein, 12 aa, Homo sapiens
CQSADYSGAWTF

SEQ ID NO: 45274 - protein, 21 aa, Homo sapiens
CVRVRLVDHSGAAAGRFLDYW

SEQ ID NO: 45275 - protein, 19 aa, Homo sapiens
CAKDQWNRYFDWLFIFDYW

SEQ ID NO: 45276 - protein, 18 aa, Homo sapiens
CARFPLWYNWNDNYFDYW

SEQ ID NO: 45277 - protein, 15 aa, Homo sapiens
CAKTYGGSYLAFDYW

SEQ ID NO: 45278 - protein, 17 aa, Homo sapiens
CARGGDLGGRDLLLDYW

SEQ ID NO: 45279 - protein, 11 aa, Homo sapiens
CQSYDDYNWVF

SEQ ID NO: 45280 - protein, 19 aa, Homo sapiens
CSRDTVLQFLEYAYYMDVW

SEQ ID NO: 45281 - protein, 24 aa, Homo sapiens
CARGHKEIGDYVSGWEPRVWFDPW

SEQ ID NO: 45282 - protein, 16 aa, Homo sapiens
CARVSGRFSLGPIDYW

SEQ ID NO: 45283 - protein, 22 aa, Homo sapiens
CAKRKSYYYDSSGYYDGAFDIW

SEQ ID NO: 45284 - protein, 21 aa, Homo sapiens
CASGSGGDYGDYVLFQWFDPW

SEQ ID NO: 45285 - protein, 17 aa, Homo sapiens
CARDPVGRTGDYVGDYW

SEQ ID NO: 45286 - protein, 13 aa, Homo sapiens
CRFFDWPNGFDLW

SEQ ID NO: 45287 - protein, 15 aa, Homo sapiens
CARRVYWNYDYMDVW

SEQ ID NO: 45288 - protein, 15 aa, Homo sapiens
CAREGENSSGYPDIW

SEQ ID NO: 45289 - protein, 20 aa, Homo sapiens
CVTTSPSGYRSYSFFYIDVW

SEQ ID NO: 45290 - protein, 19 aa, Homo sapiens
CARLQDFSHKTGSRALDYW

SEQ ID NO: 45291 - protein, 14 aa, Homo sapiens
CAKNNNGDYGFDYW

SEQ ID NO: 45292 - protein, 14 aa, Homo sapiens
CTRGGSAWSYLDYW

SEQ ID NO: 45293 - protein, 28 aa, Homo sapiens
CARHYQRAGPGFMVMFGEVLSEPGFDHW

SEQ ID NO: 45294 - protein, 14 aa, Homo sapiens
CARESKDGGYCDYW

SEQ ID NO: 45295 - protein, 15 aa, Homo sapiens
CAKDIGAQREYGVYW

SEQ ID NO: 45296 - protein, 13 aa, Homo sapiens
CSAFDSSLSAWVF

SEQ ID NO: 45297 - protein, 23 aa, Homo sapiens
CARQTSHYDIFTGYTIWGPFDHW

SEQ ID NO: 45298 - protein, 14 aa, Homo sapiens
CLTADSSGSYLWVF

SEQ ID NO: 45299 - protein, 18 aa, Homo sapiens
CARDRHSSGWRTYYMDVW

SEQ ID NO: 45300 - protein, 17 aa, Homo sapiens
CAKVSLWQLQNDYFDNW

SEQ ID NO: 45301 - protein, 14 aa, Homo sapiens
CLRKVGNAWYLDYW

SEQ ID NO: 45302 - protein, 17 aa, Homo sapiens
CVKDEGEDLRYGSFDSW

SEQ ID NO: 45303 - protein, 14 aa, Homo sapiens
CARAPLSRDYMDVW

SEQ ID NO: 45304 - protein, 15 aa, Homo sapiens
CAKVWTVPGYFFDYW

SEQ ID NO: 45305 - protein, 17 aa, Homo sapiens
CARGVFGETAYNWFDPW

SEQ ID NO: 45306 - protein, 20 aa, Homo sapiens
CARTRGYYDASGYYYAFDYW

SEQ ID NO: 45307 - protein, 18 aa, Homo sapiens
CASLTSSGWAYTDDFDIW

SEQ ID NO: 45308 - protein, 22 aa, Homo sapiens
CARHELGYTLEGADDGGHFDYW

SEQ ID NO: 45309 - protein, 20 aa, Homo sapiens
CARSETAYSSANVLYYFDNW

SEQ ID NO: 45310 - protein, 12 aa, Homo sapiens
CARQMTGYREYW

SEQ ID NO: 45311 - protein, 16 aa, Homo sapiens
CARPMTTVTSDPFDSW

SEQ ID NO: 45312 - protein, 19 aa, Homo sapiens
CARGVDASDAYFVWFFDLW

SEQ ID NO: 45313 - protein, 17 aa, Homo sapiens
CARLSSQNFYYYYMDVW

SEQ ID NO: 45314 - protein, 21 aa, Homo sapiens
CAKAQYYNIETAYYLGWFDVW

SEQ ID NO: 45315 - protein, 20 aa, Homo sapiens
CAKSPYYYDSGGYPPYFEYW

SEQ ID NO: 45316 - protein, 20 aa, Homo sapiens
CARGSSYGSPGDYYYYMDVW

SEQ ID NO: 45317 - protein, 18 aa, Homo sapiens
CARLQGRFYSGSYFLDYW

SEQ ID NO: 45318 - protein, 20 aa, Homo sapiens
CVKCAVIFVRGVIIDHFDNW

SEQ ID NO: 45319 - protein, 20 aa, Homo sapiens
CAKDLGQNDYGEAEDAFDVW

SEQ ID NO: 45320 - protein, 18 aa, Homo sapiens
CAKDVWGDGRSLSWYDYW

SEQ ID NO: 45321 - protein, 13 aa, Homo sapiens
CAKGWFVGVTDYW

SEQ ID NO: 45322 - protein, 20 aa, Homo sapiens
CARDGPDYEDVWGTYSFDLW

SEQ ID NO: 45323 - protein, 19 aa, Homo sapiens
CARAAPPQWLITTDYFDYW

SEQ ID NO: 45324 - protein, 20 aa, Homo sapiens
CAKDLIYMVTSASSHYMDVW

SEQ ID NO: 45325 - protein, 17 aa, Homo sapiens
CARPQYFNSGSYYLDHW

SEQ ID NO: 45326 - protein, 17 aa, Homo sapiens
CAKDTEVYVYNGAFDYW

SEQ ID NO: 45327 - protein, 16 aa, Homo sapiens
CAREGAMQMWSTPDYW

SEQ ID NO: 45328 - protein, 17 aa, Homo sapiens
CARGFTGSYFSRAGDYW

SEQ ID NO: 45329 - protein, 20 aa, Homo sapiens
CVRDHIQVLTHGYSYNFDHW

SEQ ID NO: 45330 - protein, 21 aa, Homo sapiens
CATDGIIMVRGGVREETFDYW

SEQ ID NO: 45331 - protein, 20 aa, Homo sapiens
CARLVTTMVRGVKFRWFDPW

SEQ ID NO: 45332 - protein, 21 aa, Homo sapiens
CAREGGIAARILVYYYYMDVW

SEQ ID NO: 45333 - protein, 16 aa, Homo sapiens
CARVGTTGEEGEFDYW

SEQ ID NO: 45334 - protein, 24 aa, Homo sapiens
CARGRFKNYDLVTGYFRPNWFDPW

SEQ ID NO: 45335 - protein, 13 aa, Homo sapiens
CATDFIKGNFDYW

SEQ ID NO: 45336 - protein, 20 aa, Homo sapiens
CARGEYSTVTSQRVNWFDPW

SEQ ID NO: 45337 - protein, 16 aa, Homo sapiens
CAGALAGGSYRGVDYW

SEQ ID NO: 45338 - protein, 19 aa, Homo sapiens
CARDGSGYFDNSGRGFDYW

SEQ ID NO: 45339 - protein, 23 aa, Homo sapiens
CARGSYYYDRSEMAYYYYYMDVW

SEQ ID NO: 45340 - protein, 24 aa, Homo sapiens
CAKVNFPGHAYHISTGFRIAFDMW

SEQ ID NO: 45341 - protein, 17 aa, Homo sapiens
CARKDGYTYGTKWFDSW

SEQ ID NO: 45342 - protein, 19 aa, Homo sapiens
CARIRGYYASGSYGWFDPW

SEQ ID NO: 45343 - protein, 19 aa, Homo sapiens
CASGQKRLRTSRDHAFDIW

SEQ ID NO: 45344 - protein, 15 aa, Homo sapiens
CASGFICGGDCTDYW

SEQ ID NO: 45345 - protein, 15 aa, Homo sapiens
CARDERSTGYDFDHW

SEQ ID NO: 45346 - protein, 14 aa, Homo sapiens
CAKEEDGLEYFQDW

SEQ ID NO: 45347 - protein, 17 aa, Homo sapiens
CAKDVYERVRGVTFDSW

SEQ ID NO: 45348 - protein, 24 aa, Homo sapiens
CATTAPDFSHVEVVTAPHDAFDIW

SEQ ID NO: 45349 - protein, 20 aa, Homo sapiens
CARDRYQKAILTTPPAFHIW

SEQ ID NO: 45350 - protein, 19 aa, Homo sapiens
CARGISYGSGTYYSYYDSW

SEQ ID NO: 45351 - protein, 15 aa, Homo sapiens
CTKAVGGPDYYFDYW

SEQ ID NO: 45352 - protein, 22 aa, Homo sapiens
CARGRPITPDYYDNSGYYYDSW

SEQ ID NO: 45353 - protein, 21 aa, Homo sapiens
CAREPNDILTGYREFGAFDIW

SEQ ID NO: 45354 - protein, 15 aa, Homo sapiens
CAKEWRTGEKAFHIW

SEQ ID NO: 45355 - protein, 20 aa, Homo sapiens
CVRATWSASVTVVVIPFHYW

SEQ ID NO: 45356 - protein, 17 aa, Homo sapiens
CARETGAFGGNNWFDSW

SEQ ID NO: 45357 - protein, 19 aa, Homo sapiens
CARMSDDSGGFNQKIFDFW

SEQ ID NO: 45358 - protein, 19 aa, Homo sapiens
CAKDMGDSRGWAFGAFDVW

SEQ ID NO: 45359 - protein, 17 aa, Homo sapiens
CASSSGRINTEGPFDIW

SEQ ID NO: 45360 - protein, 19 aa, Homo sapiens
CATDASYSGSSFVNRFDPW

SEQ ID NO: 45361 - protein, 17 aa, Homo sapiens
CAHSKGFSSSWYFFDYW

SEQ ID NO: 45362 - protein, 13 aa, Homo sapiens
CYVVTHTPGFDYW

SEQ ID NO: 45363 - protein, 23 aa, Homo sapiens
CARALDYYDSSGFYLNSYPFDIW

SEQ ID NO: 45364 - protein, 15 aa, Homo sapiens
CQSYDRTLSGSTYVF

SEQ ID NO: 45365 - protein, 12 aa, Homo sapiens
CATVGAYDLDYW

SEQ ID NO: 45366 - protein, 15 aa, Homo sapiens
CAGKDYYASGSLDYW

SEQ ID NO: 45367 - protein, 14 aa, Homo sapiens
CARAHSGITYLDYW

SEQ ID NO: 45368 - protein, 22 aa, Homo sapiens
CARGTGSGYDPDIYYYYYMDVW

SEQ ID NO: 45369 - protein, 17 aa, Homo sapiens
CARDPGRDGYSWAFDYW

SEQ ID NO: 45370 - protein, 16 aa, Homo sapiens
CARDQYGTLTPLFDYW

SEQ ID NO: 45371 - protein, 15 aa, Homo sapiens
CARHLHYDRSRFDYW

SEQ ID NO: 45372 - protein, 18 aa, Homo sapiens
CAHRARDLDWILYYFDFW

SEQ ID NO: 45373 - protein, 17 aa, Homo sapiens
CARHRSCGGDCYFKDYW

SEQ ID NO: 45374 - protein, 23 aa, Homo sapiens
CARVGSFREYQLPHDEGGYFDYW

SEQ ID NO: 45375 - protein, 15 aa, Homo sapiens
CAKYSRAWYSDLDYW

SEQ ID NO: 45376 - protein, 17 aa, Homo sapiens
CARGRYSGTYSSYFDLW

SEQ ID NO: 45377 - protein, 14 aa, Homo sapiens
CARSSSWRDVFDFW

SEQ ID NO: 45378 - protein, 16 aa, Homo sapiens
CSRQGIHLWSNWLDPW

SEQ ID NO: 45379 - protein, 11 aa, Homo sapiens
CVKESDGFDIW

SEQ ID NO: 45380 - protein, 17 aa, Homo sapiens
CVRDRSSTSKPYYFDHW

SEQ ID NO: 45381 - protein, 15 aa, Homo sapiens
CAAQSSAWDAAFEIW

SEQ ID NO: 45382 - protein, 17 aa, Homo sapiens
CARLYSSGWPLESFDIW

SEQ ID NO: 45383 - protein, 25 aa, Homo sapiens
CAREQFGSWYGRTAPYYYYYYMDVW

SEQ ID NO: 45384 - protein, 14 aa, Homo sapiens
CSSYTSSRILGEVF

SEQ ID NO: 45385 - protein, 17 aa, Homo sapiens
CLASPYNWTDDYFFDYW

SEQ ID NO: 45386 - protein, 14 aa, Homo sapiens
CARAAGDYWHFDLW

SEQ ID NO: 45387 - protein, 17 aa, Homo sapiens
CARHKIPGYSSSSLDYW

SEQ ID NO: 45388 - protein, 24 aa, Homo sapiens
CARERMKSYDYLTGSFIPNYFNPW

SEQ ID NO: 45389 - protein, 18 aa, Homo sapiens
CARDRQLGGDRDWHFDLW

SEQ ID NO: 45390 - protein, 17 aa, Homo sapiens
CAKRHCSDGLCYHFDYW

SEQ ID NO: 45391 - protein, 16 aa, Homo sapiens
CAKGTGLDTSGYTDYW

SEQ ID NO: 45392 - protein, 20 aa, Homo sapiens
CARHGPGRTDYGDFAYFDSW

SEQ ID NO: 45393 - protein, 18 aa, Homo sapiens
CAGGSGVVTALTHAFDYW

SEQ ID NO: 45394 - protein, 17 aa, Homo sapiens
CARGYDVWSDYYYMDVW

SEQ ID NO: 45395 - protein, 20 aa, Homo sapiens
CAKDLVSSSSWTYYYYMDVW

SEQ ID NO: 45396 - protein, 17 aa, Homo sapiens
CARGPPYYGDYELIDYW

SEQ ID NO: 45397 - protein, 29 aa, Homo sapiens
CARERSNLEGYSSSWYSSVGLHYYYMDVW

SEQ ID NO: 45398 - protein, 22 aa, Homo sapiens
CVRDRPRMYFYDSSGTDAFDIW

SEQ ID NO: 45399 - protein, 17 aa, Homo sapiens
CAKDEGEDLSNGYFDHW

SEQ ID NO: 45400 - protein, 13 aa, Homo sapiens
CAFSWRGGDFDSW

SEQ ID NO: 45401 - protein, 17 aa, Homo sapiens
CAKGLEKATIEDYFDYW

SEQ ID NO: 45402 - protein, 14 aa, Homo sapiens
CARDKGRIGYFDFW

SEQ ID NO: 45403 - protein, 15 aa, Homo sapiens
CARARFGSVGAFEIW

SEQ ID NO: 45404 - protein, 18 aa, Homo sapiens
CARDCIRDFDCPLRFDHW

SEQ ID NO: 45405 - protein, 17 aa, Homo sapiens
CASHSGADPYFHYMDVW

SEQ ID NO: 45406 - protein, 18 aa, Homo sapiens
CVKDPNTSGWFYWHFDLW

SEQ ID NO: 45407 - protein, 17 aa, Homo sapiens
CAKDMDPRYFYFYIDMW

SEQ ID NO: 45408 - protein, 19 aa, Homo sapiens
CVHRLVGSWTYSLHIFDIW

SEQ ID NO: 45409 - protein, 15 aa, Homo sapiens
CALMVRGHMSWFDPW

SEQ ID NO: 45410 - protein, 20 aa, Homo sapiens
CARAGPLLWFGDLTKYLDYW

SEQ ID NO: 45411 - protein, 19 aa, Homo sapiens
CARVSVRWSGYYTSWFDPW

SEQ ID NO: 45412 - protein, 17 aa, Homo sapiens
CAREGHGGGSHNYFDHW

SEQ ID NO: 45413 - protein, 15 aa, Homo sapiens
CARGDSTRPTKFDSW

SEQ ID NO: 45414 - protein, 16 aa, Homo sapiens
CARPLVERGGRWFDPW

SEQ ID NO: 45415 - protein, 17 aa, Homo sapiens
CATTQRGSWSRTTFDIW

SEQ ID NO: 45416 - protein, 12 aa, Homo sapiens
CARPVSQSFDIW

SEQ ID NO: 45417 - protein, 20 aa, Homo sapiens
CARYRMHYDYDTSGYSLDYW

SEQ ID NO: 45418 - protein, 16 aa, Homo sapiens
CARDRTGTTPGWFDPW

SEQ ID NO: 45419 - protein, 17 aa, Homo sapiens
CARVTPYDSSGHSLDYW

SEQ ID NO: 45420 - protein, 24 aa, Homo sapiens
CARVLGDHFWSGVDLNYYYYMDVW

SEQ ID NO: 45421 - protein, 20 aa, Homo sapiens
CARDPGGCGGDCSSDHFDYW

SEQ ID NO: 45422 - protein, 18 aa, Homo sapiens
CARLQTYRGGFNCPFDYW

SEQ ID NO: 45423 - protein, 16 aa, Homo sapiens
CARHSSSWYLDAFDVW

SEQ ID NO: 45424 - protein, 20 aa, Homo sapiens
CARQKPEGNCGGDCGGFDVW

SEQ ID NO: 45425 - protein, 23 aa, Homo sapiens
CARGVNTYYYTSSGDYFGWFDPW

SEQ ID NO: 45426 - protein, 17 aa, Homo sapiens
CARGRYKDGYSYYLDFW

SEQ ID NO: 45427 - protein, 14 aa, Homo sapiens
CQSPDSSGRYARVF

SEQ ID NO: 45428 - protein, 18 aa, Homo sapiens
CASFYDLRSQYLFPPDYW

SEQ ID NO: 45429 - protein, 21 aa, Homo sapiens
CARHGYDYFGGTYRLYYYDSW

SEQ ID NO: 45430 - protein, 18 aa, Homo sapiens
CARGAHYGSGQKDTFDIW

SEQ ID NO: 45431 - protein, 15 aa, Homo sapiens
CAKGVGSYYGYFDFW

SEQ ID NO: 45432 - protein, 14 aa, Homo sapiens
CARHGRGPYYFDFW

SEQ ID NO: 45433 - protein, 16 aa, Homo sapiens
CAKETRVRYFDPFDYW

SEQ ID NO: 45434 - protein, 16 aa, Homo sapiens
CARGLYGVMRGWFDPW

SEQ ID NO: 45435 - protein, 16 aa, Homo sapiens
CARGVSKQWLAYFNYW

SEQ ID NO: 45436 - protein, 19 aa, Homo sapiens
CATGKYYYSDSSGSAFDMW

SEQ ID NO: 45437 - protein, 24 aa, Homo sapiens
CAKDWANTYDSSGYYYSVDYFDYW

SEQ ID NO: 45438 - protein, 19 aa, Homo sapiens
CACYHYNYFSGSLNWFDPW

SEQ ID NO: 45439 - protein, 23 aa, Homo sapiens
CARGTGGDSSSPFYYYYYYMDVW

SEQ ID NO: 45440 - protein, 17 aa, Homo sapiens
CARDGATIYYYYCMDVW

SEQ ID NO: 45441 - protein, 17 aa, Homo sapiens
CARPGYSKSWPDAFDFW

SEQ ID NO: 45442 - protein, 20 aa, Homo sapiens
CASHGGFGAVVGTHSAFDIW

SEQ ID NO: 45443 - protein, 14 aa, Homo sapiens
CSSYISSTTFAWVF

SEQ ID NO: 45444 - protein, 20 aa, Homo sapiens
CAKAPDTAMDNSYFYYMDVW

SEQ ID NO: 45445 - protein, 14 aa, Homo sapiens
CVRRHSAMSYFDSW

SEQ ID NO: 45446 - protein, 15 aa, Homo sapiens
CARSRWLEDEASDIW

SEQ ID NO: 45447 - protein, 12 aa, Homo sapiens
CARHLYSFFHYW

SEQ ID NO: 45448 - protein, 19 aa, Homo sapiens
CARTRVGAGYYSHYYMDVW

SEQ ID NO: 45449 - protein, 22 aa, Homo sapiens
CGRWYYYDSSGYNNTALALDYW

SEQ ID NO: 45450 - protein, 15 aa, Homo sapiens
CARSTTEGYWYFDLW

SEQ ID NO: 45451 - protein, 21 aa, Homo sapiens
CARVTPFLEWLLYRSKGFDYW

SEQ ID NO: 45452 - protein, 16 aa, Homo sapiens
CARLNSGWYPYYFDYW

SEQ ID NO: 45453 - protein, 21 aa, Homo sapiens
CARGERHSSAWYRVTYYFDYW

SEQ ID NO: 45454 - protein, 14 aa, Homo sapiens
CARVLGTSNYMDVW

SEQ ID NO: 45455 - protein, 20 aa, Homo sapiens
CARTLLTYYYDSSGYYSDYW

SEQ ID NO: 45456 - protein, 21 aa, Homo sapiens
CARDPNPTSYYDRNVAYFDYW

SEQ ID NO: 45457 - protein, 20 aa, Homo sapiens
CARIQRSSGYIEIPHFIDYW

SEQ ID NO: 45458 - protein, 16 aa, Homo sapiens
CASSPDSTGWYHFDYW

SEQ ID NO: 45459 - protein, 18 aa, Homo sapiens
CARHLEVGDTSRYYEDYW

SEQ ID NO: 45460 - protein, 17 aa, Homo sapiens
CARMNRRTVTSFPFDLW

SEQ ID NO: 45461 - protein, 20 aa, Homo sapiens
CARQVYDSSGPFFYYYIDVW

SEQ ID NO: 45462 - protein, 13 aa, Homo sapiens
CTTDGQYGDYDYW

SEQ ID NO: 45463 - protein, 20 aa, Homo sapiens
CARRPYYFESSGYQYHFDYW

SEQ ID NO: 45464 - protein, 15 aa, Homo sapiens
CARQAYGSGSFFDFW

SEQ ID NO: 45465 - protein, 16 aa, Homo sapiens
CASYREYQLLDAFDIW

SEQ ID NO: 45466 - protein, 17 aa, Homo sapiens
CAKDIGFSGSLSYFDYW

SEQ ID NO: 45467 - protein, 21 aa, Homo sapiens
CAGTHYYDNTNGYYRGDFDYW

SEQ ID NO: 45468 - protein, 15 aa, Homo sapiens
CASPGQWLARGFDYW

SEQ ID NO: 45469 - protein, 20 aa, Homo sapiens
CANDGDYYNFWGGLNSLDPW

SEQ ID NO: 45470 - protein, 18 aa, Homo sapiens
CARGGDLGRDYYYSFDYW

SEQ ID NO: 45471 - protein, 14 aa, Homo sapiens
CARFDSSYWSIDYW

SEQ ID NO: 45472 - protein, 16 aa, Homo sapiens
CTTERNMAVAGTFDYW

SEQ ID NO: 45473 - protein, 21 aa, Homo sapiens
CARAAKIAAWREWVGAPFDIW

SEQ ID NO: 45474 - protein, 18 aa, Homo sapiens
CARVYDATATGYRCFDYW

SEQ ID NO: 45475 - protein, 17 aa, Homo sapiens
CVRNRRQWLMNDAFDMW

SEQ ID NO: 45476 - protein, 16 aa, Homo sapiens
CARDSGFYYEDYFDHW

SEQ ID NO: 45477 - protein, 19 aa, Homo sapiens
CAKGGLAQPDYGDYVLDYW

SEQ ID NO: 45478 - protein, 20 aa, Homo sapiens
CTRLSFSHFHGNYHDTFDLW

SEQ ID NO: 45479 - protein, 18 aa, Homo sapiens
CARRYYDSSGYPQYFNLW

SEQ ID NO: 45480 - protein, 17 aa, Homo sapiens
CAKAPSRWLQTSNFDYW

SEQ ID NO: 45481 - protein, 22 aa, Homo sapiens
CARHWTTYCSGDSCDSEHVDYW

SEQ ID NO: 45482 - protein, 16 aa, Homo sapiens
CATLVYCSGDSCADYW

SEQ ID NO: 45483 - protein, 14 aa, Homo sapiens
CAKAVAGIKPPDYW

SEQ ID NO: 45484 - protein, 20 aa, Homo sapiens
CATGFSYDRSGLYLYYFDYW

SEQ ID NO: 45485 - protein, 22 aa, Homo sapiens
CARDPMRVMSPVNYYYYYMDVW

SEQ ID NO: 45486 - protein, 17 aa, Homo sapiens
CARIPRRGVSTYSFDPW

SEQ ID NO: 45487 - protein, 14 aa, Homo sapiens
CARDIETHSYFDLW

SEQ ID NO: 45488 - protein, 20 aa, Homo sapiens
CARGLTGSIVVVVDYYMDVW

SEQ ID NO: 45489 - protein, 23 aa, Homo sapiens
CARHPSYSDSSGYLYYYYYMDIW

SEQ ID NO: 45490 - protein, 19 aa, Homo sapiens
CARGYSDQVWDNSGYIDSW

SEQ ID NO: 45491 - protein, 15 aa, Homo sapiens
CARSTSRFSPYFDSW

SEQ ID NO: 45492 - protein, 15 aa, Homo sapiens
CAAAYGSGSIWFDPW

SEQ ID NO: 45493 - protein, 15 aa, Homo sapiens
CARNRHPYWFYFDYW

SEQ ID NO: 45494 - protein, 21 aa, Homo sapiens
CAREGAGGGYGYHYYYYMDVW

SEQ ID NO: 45495 - protein, 13 aa, Homo sapiens
CVRGEIGTYFVFW

SEQ ID NO: 45496 - protein, 16 aa, Homo sapiens
CAKDRSGYYSSYLDYW

SEQ ID NO: 45497 - protein, 16 aa, Homo sapiens
CATPGGGEDFDAFDTW

SEQ ID NO: 45498 - protein, 22 aa, Homo sapiens
CARHSSYGSKRRYYYYYYMDVW

SEQ ID NO: 45499 - protein, 18 aa, Homo sapiens
CAKDIQYYFGSGSYYDYW

SEQ ID NO: 45500 - protein, 15 aa, Homo sapiens
CAAWDYGDPDAFDIW

SEQ ID NO: 45501 - protein, 18 aa, Homo sapiens
CARLGPYYYDSSPPFDYW

SEQ ID NO: 45502 - protein, 12 aa, Homo sapiens
CMQATNWPWLSF

SEQ ID NO: 45503 - protein, 18 aa, Homo sapiens
CARSPAVYREFLCWFDPW

SEQ ID NO: 45504 - protein, 20 aa, Homo sapiens
CAKDITAAAGTGNYWYFDLW

SEQ ID NO: 45505 - protein, 19 aa, Homo sapiens
CVRKNGMIHFGGGSYFDSW

SEQ ID NO: 45506 - protein, 18 aa, Homo sapiens
CAKGAELDRSGHYAFDYW

SEQ ID NO: 45507 - protein, 18 aa, Homo sapiens
CACGSGSYYNTNPLLDYW

SEQ ID NO: 45508 - protein, 23 aa, Homo sapiens
CARRIYCSSTSCYGGDYSLFDYW

SEQ ID NO: 45509 - protein, 17 aa, Homo sapiens
CARDLNVYIGFDAFDLW

SEQ ID NO: 45510 - protein, 20 aa, Homo sapiens
CLKDFGPYYNMWSGHYFDSW

SEQ ID NO: 45511 - protein, 13 aa, Homo sapiens
CQTFDSSLSGSIF

SEQ ID NO: 45512 - protein, 14 aa, Homo sapiens
CTTGHYYDSELDYW

SEQ ID NO: 45513 - protein, 20 aa, Homo sapiens
CVRDRGAVALPDNHYYMDVW

SEQ ID NO: 45514 - protein, 16 aa, Homo sapiens
CTKDVTRGYSYGFDSW

SEQ ID NO: 45515 - protein, 15 aa, Homo sapiens
CAKSTRPAAPHFDYW

SEQ ID NO: 45516 - protein, 17 aa, Homo sapiens
CARDEGFFDSSGTFDYW

SEQ ID NO: 45517 - protein, 17 aa, Homo sapiens
CASGSRLVGTYGFFDSW

SEQ ID NO: 45518 - protein, 18 aa, Homo sapiens
CARGDRIAVAGTLRFDYW

SEQ ID NO: 45519 - protein, 18 aa, Homo sapiens
CARFVRWGNYRESYSDYW

SEQ ID NO: 45520 - protein, 17 aa, Homo sapiens
CARHRESNNWDSAFDIW

SEQ ID NO: 45521 - protein, 17 aa, Homo sapiens
CATPRSIYDSNGYLGYW

SEQ ID NO: 45522 - protein, 16 aa, Homo sapiens
CARIDDIGGYVHFDYW

SEQ ID NO: 45523 - protein, 23 aa, Homo sapiens
CARGKQLASFREYSGSYYDFDYW

SEQ ID NO: 45524 - protein, 12 aa, Homo sapiens
CAREVWRFFDSW

SEQ ID NO: 45525 - protein, 18 aa, Homo sapiens
CARGDLYSSSSARCFDYW

SEQ ID NO: 45526 - protein, 10 aa, Homo sapiens
CTSESPIDYW

SEQ ID NO: 45527 - protein, 17 aa, Homo sapiens
CVKDYSWGFGTDAFDLW

SEQ ID NO: 45528 - protein, 15 aa, Homo sapiens
CARDATTRTVRFDYW

SEQ ID NO: 45529 - protein, 17 aa, Homo sapiens
CAREDYGDHAGTWLDPW

SEQ ID NO: 45530 - protein, 38 aa, Homo sapiens
CARGHEFTVLTPYTARGSSYAAGLGQHLPGPIYYFDYW

SEQ ID NO: 45531 - protein, 11 aa, Homo sapiens
CQQARTFPCTF

SEQ ID NO: 45532 - protein, 18 aa, Homo sapiens
CARDHSDFYDGRGYFEHW

SEQ ID NO: 45533 - protein, 16 aa, Homo sapiens
CARASIRHYYYYMDVW

SEQ ID NO: 45534 - protein, 11 aa, Homo sapiens
CTDEGVAFDIW

SEQ ID NO: 45535 - protein, 14 aa, Homo sapiens
CNFRDASGNHLRVF

SEQ ID NO: 45536 - protein, 11 aa, Homo sapiens
CQQYLTTPPAF

SEQ ID NO: 45537 - protein, 17 aa, Homo sapiens
CGRNIASFGYYYYTDVW

SEQ ID NO: 45538 - protein, 17 aa, Homo sapiens
CARGITGVIGFRYFDYW

SEQ ID NO: 45539 - protein, 17 aa, Homo sapiens
CARLSHFGAGYYYMDVW

SEQ ID NO: 45540 - protein, 16 aa, Homo sapiens
CARDSGYSYGRGFDYW

SEQ ID NO: 45541 - protein, 17 aa, Homo sapiens
CARATSGAYYPNWFDPW

SEQ ID NO: 45542 - protein, 22 aa, Homo sapiens
CARHEYCSGGSCYYYYYYMDVW

SEQ ID NO: 45543 - protein, 14 aa, Homo sapiens
CAREEMNLEYIDLW

SEQ ID NO: 45544 - protein, 16 aa, Homo sapiens
CARIETSNWKNNFDYW

SEQ ID NO: 45545 - protein, 17 aa, Homo sapiens
CAKCIAPYKVLGYMDVW

SEQ ID NO: 45546 - protein, 18 aa, Homo sapiens
CARVPPSHMVVAGSIDYW

SEQ ID NO: 45547 - protein, 16 aa, Homo sapiens
CARVATINYYYYLDVW

SEQ ID NO: 45548 - protein, 22 aa, Homo sapiens
CARGYCSGGSCYGDPYNFFDPW

SEQ ID NO: 45549 - protein, 14 aa, Homo sapiens
CASVSGYDFYFDDW

SEQ ID NO: 45550 - protein, 22 aa, Homo sapiens
CAREGEQHLVVSDGSAHFFDYW

SEQ ID NO: 45551 - protein, 23 aa, Homo sapiens
CARVRSRITFGGVFVDGDGFDYW

SEQ ID NO: 45552 - protein, 22 aa, Homo sapiens
CTVDRYRGGSIWSNYYYYMDVW

SEQ ID NO: 45553 - protein, 20 aa, Homo sapiens
CATHPETWISYSSSPGGDYW

SEQ ID NO: 45554 - protein, 21 aa, Homo sapiens
CAKDLSLLTGYREFGLEFDYW

SEQ ID NO: 45555 - protein, 23 aa, Homo sapiens
CARGSKMFRQHLARRYDYYMDVW

SEQ ID NO: 45556 - protein, 18 aa, Homo sapiens
CARGQRHSAYDYDALDIW

SEQ ID NO: 45557 - protein, 17 aa, Homo sapiens
CARHGIATTDNMGFDPW

SEQ ID NO: 45558 - protein, 19 aa, Homo sapiens
CARQGGGEWDLGDEGFDIW

SEQ ID NO: 45559 - protein, 21 aa, Homo sapiens
CARDPSGPSGRGGYYWYFDLW

SEQ ID NO: 45560 - protein, 16 aa, Homo sapiens
CARAPKTQHTDAFDMW

SEQ ID NO: 45561 - protein, 19 aa, Homo sapiens
CVRHGADYGDYYQHYMDVW

SEQ ID NO: 45562 - protein, 20 aa, Homo sapiens
CAKDSPYHDILTGSHVLDYW

SEQ ID NO: 45563 - protein, 16 aa, Homo sapiens
CAMSPSSGYVPYFEYW

SEQ ID NO: 45564 - protein, 18 aa, Homo sapiens
CGKDDGISWDTAMVIDYW

SEQ ID NO: 45565 - protein, 24 aa, Homo sapiens
CARDRQPYFDGSGSYYSPETFDVW

SEQ ID NO: 45566 - protein, 17 aa, Homo sapiens
CARDSDTSGLFWYFDLW

SEQ ID NO: 45567 - protein, 21 aa, Homo sapiens
CARAQEEEFPGDRRYYYMDVW

SEQ ID NO: 45568 - protein, 24 aa, Homo sapiens
CARAPMSGYDSHGTPRRGHYFDYW

SEQ ID NO: 45569 - protein, 17 aa, Homo sapiens
CAKGIAVAGPPGYFDYW

SEQ ID NO: 45570 - protein, 16 aa, Homo sapiens
CARVLRGASSHYFDSW

SEQ ID NO: 45571 - protein, 18 aa, Homo sapiens
CAHVWGGSTWIYEAFDAW

SEQ ID NO: 45572 - protein, 20 aa, Homo sapiens
CARDGRIADRQWRRGDLDYW

SEQ ID NO: 45573 - protein, 19 aa, Homo sapiens
CARSPLVPGTVIRKGFDYW

SEQ ID NO: 45574 - protein, 15 aa, Homo sapiens
CARTHVYGDYVFDNW

SEQ ID NO: 45575 - protein, 24 aa, Homo sapiens
CARGRYSGKLTIFNPYYYYYMDVW

SEQ ID NO: 45576 - protein, 16 aa, Homo sapiens
CARGYSGYDSCWFDPW

SEQ ID NO: 45577 - protein, 21 aa, Homo sapiens
CARSHYDSSAWQQMFDACDLW

SEQ ID NO: 45578 - protein, 17 aa, Homo sapiens
CASQHTSTWFFYYMDVW

SEQ ID NO: 45579 - protein, 23 aa, Homo sapiens
CARDSGFDDYYDSSGTGPRFDPW

SEQ ID NO: 45580 - protein, 17 aa, Homo sapiens
CVKNSFDWSSWGYFDNW

SEQ ID NO: 45581 - protein, 18 aa, Homo sapiens
CARLKGWYDGRKEWFDPW

SEQ ID NO: 45582 - protein, 14 aa, Homo sapiens
CATSKSGILTFDNW

SEQ ID NO: 45583 - protein, 16 aa, Homo sapiens
CVKDVYSDYGVYYDYW

SEQ ID NO: 45584 - protein, 15 aa, Homo sapiens
CARLTEMATNQFDYW

SEQ ID NO: 45585 - protein, 16 aa, Homo sapiens
CAKILIVAAGRGFDIW

SEQ ID NO: 45586 - protein, 17 aa, Homo sapiens
CARDPSAQVVTHWFDPW

SEQ ID NO: 45587 - protein, 19 aa, Homo sapiens
CARDPAWAFGDYQSYFDYW

SEQ ID NO: 45588 - protein, 20 aa, Homo sapiens
CAREGDSWTYEGSAGWFDPW

SEQ ID NO: 45589 - protein, 19 aa, Homo sapiens
CAREIPLTDGGDKNAFDIW

SEQ ID NO: 45590 - protein, 19 aa, Homo sapiens
CARDLPYCSSTNCSPFDYW

SEQ ID NO: 45591 - protein, 20 aa, Homo sapiens
CSRAQFFSDSSGYYSPFDFW

SEQ ID NO: 45592 - protein, 15 aa, Homo sapiens
CGSLSDYGEYYFDYW

SEQ ID NO: 45593 - protein, 20 aa, Homo sapiens
CARRASPLTLGDRAYYFDLW

SEQ ID NO: 45594 - protein, 13 aa, Homo sapiens
CARGLVATVVDYW

SEQ ID NO: 45595 - protein, 21 aa, Homo sapiens
CARLRYLDRSGSYGGRYFDSW

SEQ ID NO: 45596 - protein, 20 aa, Homo sapiens
CATSHRGLTFGYYYFYMDVW

SEQ ID NO: 45597 - protein, 15 aa, Homo sapiens
CARSLKWLFYYMDVW

SEQ ID NO: 45598 - protein, 16 aa, Homo sapiens
CAKDPQWLVRVYFDYW

SEQ ID NO: 45599 - protein, 18 aa, Homo sapiens
CARGFGSTSGWYRFFDLW

SEQ ID NO: 45600 - protein, 19 aa, Homo sapiens
CARHVILSDVNYVVWFDTW

SEQ ID NO: 45601 - protein, 16 aa, Homo sapiens
CARDLSMRGEYYFDLW

SEQ ID NO: 45602 - protein, 17 aa, Homo sapiens
CARGLIGLAGHWYFDLW

SEQ ID NO: 45603 - protein, 22 aa, Homo sapiens
CARGHSTETTYNWYYYYYMDVW

SEQ ID NO: 45604 - protein, 25 aa, Homo sapiens
CARDSRPSLLRYFDWLSPSDAFDVW

SEQ ID NO: 45605 - protein, 15 aa, Homo sapiens
CATHTLGSRSTFDSW

SEQ ID NO: 45606 - protein, 18 aa, Homo sapiens
CAKPLYSGYDHTGPFDYW

SEQ ID NO: 45607 - protein, 18 aa, Homo sapiens
CTRGDDGSVAAKRPFDYW

SEQ ID NO: 45608 - protein, 18 aa, Homo sapiens
CARRASITEVSDRYFDIW

SEQ ID NO: 45609 - protein, 18 aa, Homo sapiens
CARDYSGYDVDVLGFDYW

SEQ ID NO: 45610 - protein, 21 aa, Homo sapiens
CARDKGSGSSWYVLGDWFDPW

SEQ ID NO: 45611 - protein, 20 aa, Homo sapiens
CARVVLDYDTLTVPGMFDYW

SEQ ID NO: 45612 - protein, 17 aa, Homo sapiens
CTTDAPGVLVYDAFAIW

SEQ ID NO: 45613 - protein, 19 aa, Homo sapiens
CGRTRRWYGDYADGAFDLW

SEQ ID NO: 45614 - protein, 17 aa, Homo sapiens
CARVSDFARAQLPFDYW

SEQ ID NO: 45615 - protein, 17 aa, Homo sapiens
CAKDVGGSGTYYTFDNW

SEQ ID NO: 45616 - protein, 16 aa, Homo sapiens
CAKELFPYSHDAFDIW

SEQ ID NO: 45617 - protein, 20 aa, Homo sapiens
CAKRWVVTASVSDYYYMDVW

SEQ ID NO: 45618 - protein, 19 aa, Homo sapiens
CARPRYNSNWQAHTWFDPW

SEQ ID NO: 45619 - protein, 16 aa, Homo sapiens
CAREGRYRDWLFFDHW

SEQ ID NO: 45620 - protein, 17 aa, Homo sapiens
CARDLLDAYGNSYFDFW

SEQ ID NO: 45621 - protein, 19 aa, Homo sapiens
CARLMGTYYNFWSGYFDCW

SEQ ID NO: 45622 - protein, 16 aa, Homo sapiens
CARVDCGGDCYHLDYW

SEQ ID NO: 45623 - protein, 14 aa, Homo sapiens
CARGMAVAGFFDFW

SEQ ID NO: 45624 - protein, 16 aa, Homo sapiens
CAKEWGFYSGSYYDYW

SEQ ID NO: 45625 - protein, 16 aa, Homo sapiens
CARLDTAMVTDAFDIW

SEQ ID NO: 45626 - protein, 17 aa, Homo sapiens
CTREHYDSSGSRGCDYW

SEQ ID NO: 45627 - protein, 20 aa, Homo sapiens
CAKVVPFREYQLPPAYFDYW

SEQ ID NO: 45628 - protein, 20 aa, Homo sapiens
CARQAPDYGDDIFVTHFDHW

SEQ ID NO: 45629 - protein, 19 aa, Homo sapiens
CARLGGGLWFGMAGAFDIW

SEQ ID NO: 45630 - protein, 22 aa, Homo sapiens
CASRGHQYYFDSSGYYGALDVW

SEQ ID NO: 45631 - protein, 15 aa, Homo sapiens
CASGEEAAARQFDVW

SEQ ID NO: 45632 - protein, 17 aa, Homo sapiens
CAKDPHISSSYEYFDYW

SEQ ID NO: 45633 - protein, 16 aa, Homo sapiens
CAIRRANTYVASFDYW

SEQ ID NO: 45634 - protein, 16 aa, Homo sapiens
CATGHSAYYYEYFQYW

SEQ ID NO: 45635 - protein, 16 aa, Homo sapiens
CATSVQSGATDTFDVW

SEQ ID NO: 45636 - protein, 17 aa, Homo sapiens
CARTSRFGELFSWFDPW

SEQ ID NO: 45637 - protein, 14 aa, Homo sapiens
CQVWDVGSDHPYIF

SEQ ID NO: 45638 - protein, 16 aa, Homo sapiens
CARVKYCNGCYYFDYW

SEQ ID NO: 45639 - protein, 12 aa, Homo sapiens
CAGAGSDKTDYW

SEQ ID NO: 45640 - protein, 16 aa, Homo sapiens
CARVFGSGSYSWNDYW

SEQ ID NO: 45641 - protein, 14 aa, Homo sapiens
CVSFREWLVKEDYW

SEQ ID NO: 45642 - protein, 19 aa, Homo sapiens
CAKGPFKAVISPPGTRDYW

SEQ ID NO: 45643 - protein, 17 aa, Homo sapiens
CARPPAGPQLKSPFDLW

SEQ ID NO: 45644 - protein, 16 aa, Homo sapiens
CARPERSYYVSYFEYW

SEQ ID NO: 45645 - protein, 17 aa, Homo sapiens
CAREQSTVARVYYFESW

SEQ ID NO: 45646 - protein, 18 aa, Homo sapiens
CARPGVIEVRGENAFLVW

SEQ ID NO: 45647 - protein, 20 aa, Homo sapiens
CAKDFRRFGELPPNDAFDMW

SEQ ID NO: 45648 - protein, 17 aa, Homo sapiens
CARGIQRTNWPPASDYW

SEQ ID NO: 45649 - protein, 21 aa, Homo sapiens
CARRGDYDGSGSYYNDAFGLW

SEQ ID NO: 45650 - protein, 15 aa, Homo sapiens
CARAPSSWFSYYDYW

SEQ ID NO: 45651 - protein, 20 aa, Homo sapiens
CAKDGGVDSSGFSHWYFDLW

SEQ ID NO: 45652 - protein, 22 aa, Homo sapiens
CARDYGYCIGGSCYFFNWFDSW

SEQ ID NO: 45653 - protein, 16 aa, Homo sapiens
CARSEQWLVQSAFDIW

SEQ ID NO: 45654 - protein, 18 aa, Homo sapiens
CARDDILNDYGVQGFDSW

SEQ ID NO: 45655 - protein, 19 aa, Homo sapiens
CARGGGDNSGFLGTSLDYW

SEQ ID NO: 45656 - protein, 23 aa, Homo sapiens
CARDAGHYYDSRPPVYYYYMDVW

SEQ ID NO: 45657 - protein, 22 aa, Homo sapiens
CARGNFWSGPHGGSYHSYMDVW

SEQ ID NO: 45658 - protein, 21 aa, Homo sapiens
CAKDPHPRPKTTVQGFWFDPW

SEQ ID NO: 45659 - protein, 14 aa, Homo sapiens
CAHSNWNYGWFGPW

SEQ ID NO: 45660 - protein, 18 aa, Homo sapiens
CASDRGGYSGYDSNFDFW

SEQ ID NO: 45661 - protein, 19 aa, Homo sapiens
CARGHSGWELLPHYYMDVW

SEQ ID NO: 45662 - protein, 15 aa, Homo sapiens
CAKDISPVNGFFDNW

SEQ ID NO: 45663 - protein, 16 aa, Homo sapiens
CARLSPNHFSWYIDYW

SEQ ID NO: 45664 - protein, 17 aa, Homo sapiens
CARDQMRNYYDSPKDYW

SEQ ID NO: 45665 - protein, 23 aa, Homo sapiens
CARDGGLAIFGVVLPHNHYMDVW

SEQ ID NO: 45666 - protein, 13 aa, Homo sapiens
CAKMVGADYFDYW

SEQ ID NO: 45667 - protein, 15 aa, Homo sapiens
CATPAALWSGYYDYW

SEQ ID NO: 45668 - protein, 17 aa, Homo sapiens
CAHSPIFWEPQAYFDYW

SEQ ID NO: 45669 - protein, 10 aa, Homo sapiens
CQQFKNYWTF

SEQ ID NO: 45670 - protein, 17 aa, Homo sapiens
CGRLPSSGWAQGAFDLW

SEQ ID NO: 45671 - protein, 23 aa, Homo sapiens
CARCSSYSGYSSVWHGYNWFDPW

SEQ ID NO: 45672 - protein, 17 aa, Homo sapiens
CARGGTYYYGSGPFDPW

SEQ ID NO: 45673 - protein, 18 aa, Homo sapiens
CARPARSGWNDLFYFDPW

SEQ ID NO: 45674 - protein, 17 aa, Homo sapiens
CARDPRSGNFYDAFDIW

SEQ ID NO: 45675 - protein, 24 aa, Homo sapiens
CARELRDYDILTGSFRNSELIDYW

SEQ ID NO: 45676 - protein, 19 aa, Homo sapiens
CARDRGLEWLPLQSQFDLW

SEQ ID NO: 45677 - protein, 17 aa, Homo sapiens
CAKEGYIRRTGYFFDHW

SEQ ID NO: 45678 - protein, 19 aa, Homo sapiens
CAKDIRRLAVDVSNPLDSW

SEQ ID NO: 45679 - protein, 22 aa, Homo sapiens
CASQPLHCTGTVCYFRGSFDVW

SEQ ID NO: 45680 - protein, 14 aa, Homo sapiens
CTSWHSSGWPGDYW

SEQ ID NO: 45681 - protein, 15 aa, Homo sapiens
CTRDDYFDWLFYDYW

SEQ ID NO: 45682 - protein, 17 aa, Homo sapiens
CALRRGDGNKGGIFDLW

SEQ ID NO: 45683 - protein, 18 aa, Homo sapiens
CARDWGTTVVTPRYFQYW

SEQ ID NO: 45684 - protein, 15 aa, Homo sapiens
CVRHPRDRRTAFDIW

SEQ ID NO: 45685 - protein, 19 aa, Homo sapiens
CARGRRSWQTYYYYYMDVW

SEQ ID NO: 45686 - protein, 19 aa, Homo sapiens
CARHGYNMVRAVMYAFNIW

SEQ ID NO: 45687 - protein, 19 aa, Homo sapiens
CARVESFREYFGVVGFDYW

SEQ ID NO: 45688 - protein, 16 aa, Homo sapiens
CQKYKSAPYKSAPRTF

SEQ ID NO: 45689 - protein, 21 aa, Homo sapiens
CARDGTTVTTRGLYYYYMDVW

SEQ ID NO: 45690 - protein, 14 aa, Homo sapiens
CARDYGWYHYSDSW

SEQ ID NO: 45691 - protein, 19 aa, Homo sapiens
CVKGYYGSPTTSLYYFDSW

SEQ ID NO: 45692 - protein, 23 aa, Homo sapiens
CARESYSDFWSGYFNYYYYMDVW

SEQ ID NO: 45693 - protein, 22 aa, Homo sapiens
CARGHQVDGKVVRKYYQAMDVW

SEQ ID NO: 45694 - protein, 17 aa, Homo sapiens
CARGGDSSGPFDHFDIW

SEQ ID NO: 45695 - protein, 19 aa, Homo sapiens
CAKTPQYLDYYGSREFDYW

SEQ ID NO: 45696 - protein, 17 aa, Homo sapiens
CARTTLWLARGAAFDLW

SEQ ID NO: 45697 - protein, 15 aa, Homo sapiens
CARAIQLWSTPFDYW

SEQ ID NO: 45698 - protein, 15 aa, Homo sapiens
CARISAGYNSWFDYW

SEQ ID NO: 45699 - protein, 18 aa, Homo sapiens
CARQEGPHSTGWYRFDVW

SEQ ID NO: 45700 - protein, 18 aa, Homo sapiens
CASRGYSGYDSSYFLDYW

SEQ ID NO: 45701 - protein, 14 aa, Homo sapiens
CTTDRYYYDAFDIW

SEQ ID NO: 45702 - protein, 20 aa, Homo sapiens
CARGPLPLLGASAMAWLDPW

SEQ ID NO: 45703 - protein, 14 aa, Homo sapiens
CAKLGADGDYSDYW

SEQ ID NO: 45704 - protein, 15 aa, Homo sapiens
CARTRWVKDDWFDPW

SEQ ID NO: 45705 - protein, 24 aa, Homo sapiens
CAVGPHYDTLTGPDYYSYYYMDVW

SEQ ID NO: 45706 - protein, 14 aa, Homo sapiens
CTTVFWSDPPFDYW

SEQ ID NO: 45707 - protein, 16 aa, Homo sapiens
CARDGGVETTGGFYYW

SEQ ID NO: 45708 - protein, 18 aa, Homo sapiens
CAKGVATSGWYVEYLDSW

SEQ ID NO: 45709 - protein, 23 aa, Homo sapiens
CATLTQSYDVLTGYSPRYYFHYW

SEQ ID NO: 45710 - protein, 20 aa, Homo sapiens
CTKGTHFYESSGFNDAFDIW

SEQ ID NO: 45711 - protein, 17 aa, Homo sapiens
CARFKGYYYRASWFDPW

SEQ ID NO: 45712 - protein, 17 aa, Homo sapiens
CARAVKAGGSRGRLDYW

SEQ ID NO: 45713 - protein, 25 aa, Homo sapiens
CAKSMRPQDILTLVGDRVDDWFDPW

SEQ ID NO: 45714 - protein, 19 aa, Homo sapiens
CARHWESGTNSYYYYLDVW

SEQ ID NO: 45715 - protein, 17 aa, Homo sapiens
CAMTPTTWTFLSYMDVW

SEQ ID NO: 45716 - protein, 17 aa, Homo sapiens
CAKPFQVMIMTSVFDSW

SEQ ID NO: 45717 - protein, 19 aa, Homo sapiens
CARTYYYGSGSHLYYFDYW

SEQ ID NO: 45718 - protein, 13 aa, Homo sapiens
CAKDYGGVPFDYW

SEQ ID NO: 45719 - protein, 14 aa, Homo sapiens
CVRDYITVTDLDYW

SEQ ID NO: 45720 - protein, 15 aa, Homo sapiens
CVRRPLIGDDWFDPW

SEQ ID NO: 45721 - protein, 19 aa, Homo sapiens
CARFGPPEPGASTNWFDPW

SEQ ID NO: 45722 - protein, 15 aa, Homo sapiens
CARVGYYDNSGLDYW

SEQ ID NO: 45723 - protein, 19 aa, Homo sapiens
CARDLTGVFGVLIGTFDYW

SEQ ID NO: 45724 - protein, 20 aa, Homo sapiens
CVRDRYQPTMVRGMGWIDPW

SEQ ID NO: 45725 - protein, 16 aa, Homo sapiens
CAKEARDRGRYYFDYW

SEQ ID NO: 45726 - protein, 14 aa, Homo sapiens
CTKVILFYAAFDLW

SEQ ID NO: 45727 - protein, 18 aa, Homo sapiens
CARGVYSFGPESDAFALW

SEQ ID NO: 45728 - protein, 21 aa, Homo sapiens
CARSVVVTAINSVDTSAFDIW

SEQ ID NO: 45729 - protein, 16 aa, Homo sapiens
CARRFCSGGNCMFDYW

SEQ ID NO: 45730 - protein, 20 aa, Homo sapiens
CAKLETNDILTGYYPHFDSW

SEQ ID NO: 45731 - protein, 15 aa, Homo sapiens [sequence omitted]

SEQ ID NO: 45732 - protein, 20 aa, Homo sapiens
CARHRFNSFMVRGSNWFDPW

SEQ ID NO: 45733 - protein, 25 aa, Homo sapiens
CARDGGTTNDYDILTGYSLNWFDPW

SEQ ID NO: 45734 - protein, 16 aa, Homo sapiens
CARGDPLRHFDWFRSW

SEQ ID NO: 45735 - protein, 25 aa, Homo sapiens
CVKNTNLRYYYDSANYYSTGAFDLW

SEQ ID NO: 45736 - protein, 20 aa, Homo sapiens
CASSTVLGAWFGEGNWFDPW

SEQ ID NO: 45737 - protein, 19 aa, Homo sapiens
CAKDPRRGGGGGEGSIDYW

SEQ ID NO: 45738 - protein, 20 aa, Homo sapiens
CARGLPRIAAAGTNRWFDPW

SEQ ID NO: 45739 - protein, 20 aa, Homo sapiens
CAREVYYSFWTGHEYYFDYW

SEQ ID NO: 45740 - protein, 18 aa, Homo sapiens
CARGSHMYSSGYNWLDPW

SEQ ID NO: 45741 - protein, 21 aa, Homo sapiens
CASSVGQYDTFGQTLGNFDHW

SEQ ID NO: 45742 - protein, 19 aa, Homo sapiens
CARGYSYDYTGAGGGFDIW

SEQ ID NO: 45743 - protein, 14 aa, Homo sapiens
CARGPYGTKPFDVW

SEQ ID NO: 45744 - protein, 24 aa, Homo sapiens
CARDRAPIDARYSSSPIFNAFDIW

SEQ ID NO: 45745 - protein, 24 aa, Homo sapiens
CAKGGVEVSFPSSGYYLPTLFDYW

SEQ ID NO: 45746 - protein, 20 aa, Homo sapiens
CAREAAARSLWERQYFFDYW

SEQ ID NO: 45747 - protein, 15 aa, Homo sapiens
CAKGKGGYATFFDYW

SEQ ID NO: 45748 - protein, 13 aa, Homo sapiens
CQQRSPRPPLITF

SEQ ID NO: 45749 - protein, 18 aa, Homo sapiens
CAKDRYYDSSRRGYMDVW

SEQ ID NO: 45750 - protein, 20 aa, Homo sapiens
CVRATGDRAFSNFYYYMDVW

SEQ ID NO: 45751 - protein, 15 aa, Homo sapiens
CAKDRRLAPAAIDYW

SEQ ID NO: 45752 - protein, 16 aa, Homo sapiens
CARDSRGAPFYYFDYW

SEQ ID NO: 45753 - protein, 18 aa, Homo sapiens
CARDGDLGIAPMVGFDPW

SEQ ID NO: 45754 - protein, 22 aa, Homo sapiens
CAIFAADMSGSNRVTSTTRDYW

SEQ ID NO: 45755 - protein, 23 aa, Homo sapiens
CSKDRIRLPYGSSGYYTTFLDYW

SEQ ID NO: 45756 - protein, 17 aa, Homo sapiens
CASDRRETSDWYVVDYW

SEQ ID NO: 45757 - protein, 10 aa, Homo sapiens
CTRGAFFDDW

SEQ ID NO: 45758 - protein, 13 aa, Homo sapiens
CMQSVQLPPRITF

SEQ ID NO: 45759 - protein, 23 aa, Homo sapiens
CARDASMITFGGVIVIPDLIDYW

SEQ ID NO: 45760 - protein, 20 aa, Homo sapiens
CVRDENHYDSANAFYYFGHW

SEQ ID NO: 45761 - protein, 21 aa, Homo sapiens
CARSLPAVQRLLRGGYYFDDW

SEQ ID NO: 45762 - protein, 19 aa, Homo sapiens
CARDWFGGYSDRNAYNSYW

SEQ ID NO: 45763 - protein, 14 aa, Homo sapiens
CAADWLDPVPFDLW

SEQ ID NO: 45764 - protein, 14 aa, Homo sapiens
CAREGPTTYYYDYW

SEQ ID NO: 45765 - protein, 17 aa, Homo sapiens
CAVLLWWRRPDDAFDVW

SEQ ID NO: 45766 - protein, 20 aa, Homo sapiens
CVRKRPSFHETTGLGAFDIW

SEQ ID NO: 45767 - protein, 15 aa, Homo sapiens
CVREREYGDFRGDYW

SEQ ID NO: 45768 - protein, 21 aa, Homo sapiens
CARDRGYCAGDCQSEGAFDIW

SEQ ID NO: 45769 - protein, 19 aa, Homo sapiens
CARDRRAYYFDTSGYFDSW

SEQ ID NO: 45770 - protein, 18 aa, Homo sapiens
CARHIVGTNLRTYYFDYW

SEQ ID NO: 45771 - protein, 17 aa, Homo sapiens
CARVKVWYYESSEIDYW

SEQ ID NO: 45772 - protein, 18 aa, Homo sapiens
CAREFKDNYYDSSGLDYW

SEQ ID NO: 45773 - protein, 16 aa, Homo sapiens
CARQGGRLLFGGFDPW

SEQ ID NO: 45774 - protein, 17 aa, Homo sapiens
CARDRGRRRYYSYMDVW

SEQ ID NO: 45775 - protein, 22 aa, Homo sapiens
CAREGGYSGYDPSYFYFYMDVW

SEQ ID NO: 45776 - protein, 17 aa, Homo sapiens
CAKGRNNFESSSYLDHW

SEQ ID NO: 45777 - protein, 20 aa, Homo sapiens
CAKDAVPGARFYYYYYMDVW

SEQ ID NO: 45778 - protein, 16 aa, Homo sapiens
CASVEGDMYSEAFDVW

SEQ ID NO: 45779 - protein, 24 aa, Homo sapiens
CARHPHSSSSSGWGYYYYYYMDVW

SEQ ID NO: 45780 - protein, 11 aa, Homo sapiens [sequence omitted]

SEQ ID NO: 45781 - protein, 18 aa, Homo sapiens
CARDILTGYYNYDAFDLW

SEQ ID NO: 45782 - protein, 18 aa, Homo sapiens
CVKNFYEYAWGSYRLDYW

SEQ ID NO: 45783 - protein, 17 aa, Homo sapiens
CAREIYSSRWSHTFDYW

SEQ ID NO: 45784 - protein, 20 aa, Homo sapiens
CARQQTTIIGPGFVGAFDIW

SEQ ID NO: 45785 - protein, 17 aa, Homo sapiens
CTSGIKIPTSALAFDMW

SEQ ID NO: 45786 - protein, 13 aa, Homo sapiens
CMHGLHLPLPLTF

SEQ ID NO: 45787 - protein, 16 aa, Homo sapiens
CARDIGGYKEFGLDYW

SEQ ID NO: 45788 - protein, 17 aa, Homo sapiens
CAKVKSSGWLRGGFDIW

SEQ ID NO: 45789 - protein, 18 aa, Homo sapiens
CARPNSGATWYGRPFEYW

SEQ ID NO: 45790 - protein, 19 aa, Homo sapiens
CATFGGRGYSYMYNWFDPW

SEQ ID NO: 45791 - protein, 20 aa, Homo sapiens
CTSDVLDFGDYPPKYYFDSW

SEQ ID NO: 45792 - protein, 15 aa, Homo sapiens
CAKISGRYFGPFDYW

SEQ ID NO: 45793 - protein, 24 aa, Homo sapiens
CARLSPERSVYSGYRGGGFYSDYW

SEQ ID NO: 45794 - protein, 10 aa, Homo sapiens [sequence omitted]

SEQ ID NO: 45795 - protein, 16 aa, Homo sapiens
CAKARGFGSGNCFDSW

SEQ ID NO: 45796 - protein, 18 aa, Homo sapiens
CAKDLRRLRPFYWYFDLW

SEQ ID NO: 45797 - protein, 18 aa, Homo sapiens
CAKGYCSNVVCRDVFDIW

SEQ ID NO: 45798 - protein, 17 aa, Homo sapiens
CARDLDYDILTRAADYW

SEQ ID NO: 45799 - protein, 14 aa, Homo sapiens
CAGRYNWNDAFEYW

SEQ ID NO: 45800 - protein, 19 aa, Homo sapiens
CAKLRASGTFVAGRPLDYW

SEQ ID NO: 45801 - protein, 20 aa, Homo sapiens
CAREGRFDYDSSASVYFDFW

SEQ ID NO: 45802 - protein, 17 aa, Homo sapiens
CAKVSIRHSVTYYFDYW

SEQ ID NO: 45803 - protein, 16 aa, Homo sapiens
CAKDRRSGWPNSLDYW

SEQ ID NO: 45804 - protein, 19 aa, Homo sapiens
CARDGNFFDISGSGYFDYW

SEQ ID NO: 45805 - protein, 18 aa, Homo sapiens
CARHFPQWLTTTNWFDPW

SEQ ID NO: 45806 - protein, 15 aa, Homo sapiens
CTRVYRGSAGYFDYW

SEQ ID NO: 45807 - protein, 20 aa, Homo sapiens
CAKYDYYDGSGYVPPHLDYW

SEQ ID NO: 45808 - protein, 14 aa, Homo sapiens
CARQYIERHASDYW

SEQ ID NO: 45809 - protein, 20 aa, Homo sapiens
CATGGGDCSTTTCLPFFDSW

SEQ ID NO: 45810 - protein, 18 aa, Homo sapiens
CARIRRYSSGWHNYFDFW

SEQ ID NO: 45811 - protein, 18 aa, Homo sapiens
CARPGVPAAIYYYYMDVW

SEQ ID NO: 45812 - protein, 17 aa, Homo sapiens
CAKDARHCGGDCYQDYW

SEQ ID NO: 45813 - protein, 21 aa, Homo sapiens
CARDSGYSGYEGYYYYYMDVW

SEQ ID NO: 45814 - protein, 18 aa, Homo sapiens
CAKNIQRAVASPDAFDIW

SEQ ID NO: 45815 - protein, 21 aa, Homo sapiens
CAKGIMKYCSGGSCFASFDYW

SEQ ID NO: 45816 - protein, 13 aa, Homo sapiens
CARHFVLSPFDSW

SEQ ID NO: 45817 - protein, 17 aa, Homo sapiens
CARPVAGIRGDDAFDTW

SEQ ID NO: 45818 - protein, 16 aa, Homo sapiens
CVKEPGSRVYWYFDLW

SEQ ID NO: 45819 - protein, 21 aa, Homo sapiens
CAKDVRVGASPRAFQNYYDYW

SEQ ID NO: 45820 - protein, 21 aa, Homo sapiens
CAHSRYYYDSSGYPHDAFDIW

SEQ ID NO: 45821 - protein, 13 aa, Homo sapiens
CASLRVMTGFDYW

SEQ ID NO: 45822 - protein, 19 aa, Homo sapiens
CARSNRDLGLAATGYFDYW

SEQ ID NO: 45823 - protein, 21 aa, Homo sapiens
CARGTYYYGSGSYSLDAFDIW

SEQ ID NO: 45824 - protein, 20 aa, Homo sapiens
CARASGEYSERYFGMHFDHW

SEQ ID NO: 45825 - protein, 21 aa, Homo sapiens
CTRDLYYDLLTGYYQYYFDYW

SEQ ID NO: 45826 - protein, 20 aa, Homo sapiens
CASSHDIFSGPGPFNYLDVW

SEQ ID NO: 45827 - protein, 15 aa, Homo sapiens
CARAYYFDRDAFDIW

SEQ ID NO: 45828 - protein, 26 aa, Homo sapiens
CARRPGLSYISMVRGKGSSGTAFDIW

SEQ ID NO: 45829 - protein, 20 aa, Homo sapiens
CARRMSYYYESSGHNWFDPW

SEQ ID NO: 45830 - protein, 20 aa, Homo sapiens
CARGYLQFLEWSIGGAFDYW

SEQ ID NO: 45831 - protein, 16 aa, Homo sapiens
CATVAHKVRNDAFDIW

SEQ ID NO: 45832 - protein, 20 aa, Homo sapiens
CARTSTTSFPSTYYYYMDVW

SEQ ID NO: 45833 - protein, 19 aa, Homo sapiens
CARYPSVFYALGSAYFDWW

SEQ ID NO: 45834 - protein, 11 aa, Homo sapiens
CARGRSIFSYW

SEQ ID NO: 45835 - protein, 21 aa, Homo sapiens
CARIPREYDNSGHYLGWFDPW

SEQ ID NO: 45836 - protein, 15 aa, Homo sapiens
CARWQGSSSWGLDYW

SEQ ID NO: 45837 - protein, 16 aa, Homo sapiens
CARPAHGDYFKWFDPW

SEQ ID NO: 45838 - protein, 17 aa, Homo sapiens
CARSYATDWYVWYFDLW

SEQ ID NO: 45839 - protein, 20 aa, Homo sapiens
CARDRAGTGATAPPDAFDVW

SEQ ID NO: 45840 - protein, 20 aa, Homo sapiens
CARADILAAAGTAYWYFDLW

SEQ ID NO: 45841 - protein, 15 aa, Homo sapiens
CARDKTESLDAFDIW

SEQ ID NO: 45842 - protein, 19 aa, Homo sapiens
CAKESRQQGKLGSDAFDIW

SEQ ID NO: 45843 - protein, 18 aa, Homo sapiens
CARDGSSWPYYYNYMDVW

SEQ ID NO: 45844 - protein, 19 aa, Homo sapiens
CTTPGGSGGGGSRGYFASW

SEQ ID NO: 45845 - protein, 16 aa, Homo sapiens
CARGLDGSGLQPFDYW

SEQ ID NO: 45846 - protein, 19 aa, Homo sapiens
CVHLFGRLATISGQPFDPW

SEQ ID NO: 45847 - protein, 17 aa, Homo sapiens
CARSPVQLERLNWFDPW

SEQ ID NO: 45848 - protein, 21 aa, Homo sapiens
CVHGGDFYDSEEYTGYYFDFW

SEQ ID NO: 45849 - protein, 20 aa, Homo sapiens
CARSLVHSDSSAYFYYFDYW

SEQ ID NO: 45850 - protein, 23 aa, Homo sapiens
CARVSTYYHFLTGYYTNYYFDSW

SEQ ID NO: 45851 - protein, 23 aa, Homo sapiens
CARLVAAVSLRSFSDSLYYLDVW

SEQ ID NO: 45852 - protein, 14 aa, Homo sapiens
CQSADISAPYPLVF

SEQ ID NO: 45853 - protein, 18 aa, Homo sapiens
CVRPVYDAAAGTPHFAYW

SEQ ID NO: 45854 - protein, 20 aa, Homo sapiens
CARSLGWVEPTTIRSAFDIW

SEQ ID NO: 45855 - protein, 24 aa, Homo sapiens
CARERFKNYDSLSGKFIPFWFHPW

SEQ ID NO: 45856 - protein, 23 aa, Homo sapiens
CARDVSFYSSWAEKDTFYYMDVW

SEQ ID NO: 45857 - protein, 18 aa, Homo sapiens
CARVVRKVRTVADAFDLW

SEQ ID NO: 45858 - protein, 18 aa, Homo sapiens
CAKDNAISGYREYYFDYW

SEQ ID NO: 45859 - protein, 21 aa, Homo sapiens
CARSLSYDILTANGTRGFDHW

SEQ ID NO: 45860 - protein, 23 aa, Homo sapiens
CARDRRSRGVLWSPEYYYYMDVW

SEQ ID NO: 45861 - protein, 23 aa, Homo sapiens
CARTVVEMVRGVGYFYYYYMDVW

SEQ ID NO: 45862 - protein, 19 aa, Homo sapiens
CARIPVGYNYRTQYYFDSW

SEQ ID NO: 45863 - protein, 18 aa, Homo sapiens
CARGRVAVAGIWGLFDYW

SEQ ID NO: 45864 - protein, 15 aa, Homo sapiens
CARLYSYREYTIDYW

SEQ ID NO: 45865 - protein, 17 aa, Homo sapiens
CARDATLVVVTGYFDYW

SEQ ID NO: 45866 - protein, 13 aa, Homo sapiens
CQVWDPSRAHPLF

SEQ ID NO: 45867 - protein, 17 aa, Homo sapiens
CAKLGSITIFREYFDLW

SEQ ID NO: 45868 - protein, 12 aa, Homo sapiens
CVRHLRTAHDYW

SEQ ID NO: 45869 - protein, 15 aa, Homo sapiens
CAKDRGYNYGHFDYW

SEQ ID NO: 45870 - protein, 19 aa, Homo sapiens
CAREEHPATVTTLGAFDIW

SEQ ID NO: 45871 - protein, 27 aa, Homo sapiens
CARSRCSGWYSSGYFSSLFECSTFDYW

SEQ ID NO: 45872 - protein, 18 aa, Homo sapiens
CARDKGGMARWYYYMDVW

SEQ ID NO: 45873 - protein, 19 aa, Homo sapiens
CAKDHGSGSYYSYSYMDVW

SEQ ID NO: 45874 - protein, 23 aa, Homo sapiens
CSTFFRTSRTTLFGVRITDFEYW

SEQ ID NO: 45875 - protein, 18 aa, Homo sapiens
CAKDINRYSDFDYYFDYW

SEQ ID NO: 45876 - protein, 16 aa, Homo sapiens
CARRARWPHRYYMDVW

SEQ ID NO: 45877 - protein, 17 aa, Homo sapiens
CAREGYYDSRGYYLGYW

SEQ ID NO: 45878 - protein, 18 aa, Homo sapiens
CARDGPGSGRPYIPFDYW

SEQ ID NO: 45879 - protein, 16 aa, Homo sapiens
CIKDVQGITFDAFDVW

SEQ ID NO: 45880 - protein, 20 aa, Homo sapiens
CARGGRGEFDYGGASWLDPW

SEQ ID NO: 45881 - protein, 16 aa, Homo sapiens
CARMRGFDYAYGMDYW

SEQ ID NO: 45882 - protein, 20 aa, Homo sapiens
CARQDEDCTWRRCVYYMDVW

SEQ ID NO: 45883 - protein, 15 aa, Homo sapiens
CAREVVYSGNWLDPW

SEQ ID NO: 45884 - protein, 17 aa, Homo sapiens
CAKDRVRGVIIGTFDYW

SEQ ID NO: 45885 - protein, 17 aa, Homo sapiens
CASSDYYGSGSYGFDYW

SEQ ID NO: 45886 - protein, 16 aa, Homo sapiens
CNMGTDFYHYYYMDVW

SEQ ID NO: 45887 - protein, 13 aa, Homo sapiens
CQVWDSRSGHQMF

SEQ ID NO: 45888 - protein, 22 aa, Homo sapiens
CARHNYFDTSGYYYPFDAFDIW

SEQ ID NO: 45889 - protein, 18 aa, Homo sapiens
CARDAAHYDTNGRDFDSW

SEQ ID NO: 45890 - protein, 16 aa, Homo sapiens
CARTYGYGRGDALYIW

SEQ ID NO: 45891 - protein, 21 aa, Homo sapiens
CARVPSSSWYEPYYYYYMDVW

SEQ ID NO: 45892 - protein, 17 aa, Homo sapiens
CAKEGDMVRGLGGFDPW

SEQ ID NO: 45893 - protein, 19 aa, Homo sapiens
CARGVGVIWFGEYAAFDPW

SEQ ID NO: 45894 - protein, 20 aa, Homo sapiens
CARDPDYYHSPGYGSYFDYW

SEQ ID NO: 45895 - protein, 20 aa, Homo sapiens
CVKDSPMARGVWVGYYFDSW

SEQ ID NO: 45896 - protein, 21 aa, Homo sapiens
CARDGVVTPTRYFYYYYMDVW

SEQ ID NO: 45897 - protein, 20 aa, Homo sapiens
CARGLGYYTDSSGYWQFDLW

SEQ ID NO: 45898 - protein, 18 aa, Homo sapiens
CARDNYYDSSGEFAFDVW

SEQ ID NO: 45899 - protein, 23 aa, Homo sapiens
CARVRNGYCSGGSCYGHNWFDPW

SEQ ID NO: 45900 - protein, 14 aa, Homo sapiens
CARHFLYSRGVDYW

SEQ ID NO: 45901 - protein, 21 aa, Homo sapiens
CARDRRGYDSSDYFGAYFDTW

SEQ ID NO: 45902 - protein, 19 aa, Homo sapiens
CTTGGDYYDSSGYFPQDYW

SEQ ID NO: 45903 - protein, 19 aa, Homo sapiens
CARGSGGSREYDYFYMDVW

SEQ ID NO: 45904 - protein, 21 aa, Homo sapiens
CARSLNYCTDGVCYFNWFDPW

SEQ ID NO: 45905 - protein, 20 aa, Homo sapiens
CATGGGDCGRSSCYPYFDYW

SEQ ID NO: 45906 - protein, 18 aa, Homo sapiens
CARDRRAVASGSSWFDPW

SEQ ID NO: 45907 - protein, 16 aa, Homo sapiens
CARVGWSSGYNWIDPW

SEQ ID NO: 45908 - protein, 16 aa, Homo sapiens
CAKDRYATGLTPPDYW

SEQ ID NO: 45909 - protein, 15 aa, Homo sapiens
CTRDRYMSGWYRDSW

SEQ ID NO: 45910 - protein, 22 aa, Homo sapiens
CARLPYYDYVWGSYRSYYFDYW

SEQ ID NO: 45911 - protein, 16 aa, Homo sapiens
CARDLRGDSDYYMDVW

SEQ ID NO: 45912 - protein, 20 aa, Homo sapiens
CAKKGYSESPNAYYYYMDVW

SEQ ID NO: 45913 - protein, 18 aa, Homo sapiens
CARNVLPTGMPADYFDSW

SEQ ID NO: 45914 - protein, 18 aa, Homo sapiens
CARASSGYSSPSFHFDYW

SEQ ID NO: 45915 - protein, 24 aa, Homo sapiens
CIRYEPLQNYYDSSGYYIGLNDYW

SEQ ID NO: 45916 - protein, 16 aa, Homo sapiens
CTRSFYESRRYYADYW

SEQ ID NO: 45917 - protein, 21 aa, Homo sapiens
CAKPEKPGSGYYYHAVGFDYW

SEQ ID NO: 45918 - protein, 16 aa, Homo sapiens
CAREKPYSFSYEFDFW

SEQ ID NO: 45919 - protein, 26 aa, Homo sapiens
CARDRRVEYSDFSGYSKDAGDAFDLW

SEQ ID NO: 45920 - protein, 17 aa, Homo sapiens
CARDPPPTMVPSWFDVW

SEQ ID NO: 45921 - protein, 22 aa, Homo sapiens
CARLRCYNDVCSVQAPYYMDVW

SEQ ID NO: 45922 - protein, 16 aa, Homo sapiens
CARGDSSALGLGLDYW

SEQ ID NO: 45923 - protein, 17 aa, Homo sapiens
CARGENYFGSGSHLDYW

SEQ ID NO: 45924 - protein, 20 aa, Homo sapiens
CARLTGIVGTTRPEFWFDPW

SEQ ID NO: 45925 - protein, 19 aa, Homo sapiens
CAKDFSVYGDFLRAPFDSW

SEQ ID NO: 45926 - protein, 16 aa, Homo sapiens
CARGQRLHLWSYFDSW

SEQ ID NO: 45927 - protein, 20 aa, Homo sapiens
CAKDAVADYYDSSPYYFDYW

SEQ ID NO: 45928 - protein, 18 aa, Homo sapiens
CAREGDRGGYDYGYFDYW

SEQ ID NO: 45929 - protein, 20 aa, Homo sapiens
CARKYYGSRSPYISNWIDPW

SEQ ID NO: 45930 - protein, 16 aa, Homo sapiens
CAKTAGFGDLDAFDLW

SEQ ID NO: 45931 - protein, 17 aa, Homo sapiens
CVKDQSSTWYPVHFQYW

SEQ ID NO: 45932 - protein, 16 aa, Homo sapiens
CAGPRRGDYGDYIEYW

SEQ ID NO: 45933 - protein, 22 aa, Homo sapiens
CARDPRDTSGYKFPPVYYMDVW

SEQ ID NO: 45934 - protein, 22 aa, Homo sapiens
CARAEFFYHDSAAYWTKWFDPW

SEQ ID NO: 45935 - protein, 22 aa, Homo sapiens
CARDRSDVRRRGVVAPYYLDYW

SEQ ID NO: 45936 - protein, 18 aa, Homo sapiens
CAITMIRGVIEPYYFDYW

SEQ ID NO: 45937 - protein, 19 aa, Homo sapiens
CAKGQGRYVVPAACYFQHW

SEQ ID NO: 45938 - protein, 24 aa, Homo sapiens
CARSGPDGLYYHDSSGYPYYFDYW

SEQ ID NO: 45939 - protein, 25 aa, Homo sapiens
CASERGGNYYESSGNYYYNYYMDVW

SEQ ID NO: 45940 - protein, 16 aa, Homo sapiens
CTRVMWFAEPIGNDYW

SEQ ID NO: 45941 - protein, 14 aa, Homo sapiens
CARDGSTKSIADYW

SEQ ID NO: 45942 - protein, 18 aa, Homo sapiens
CAKVPEYSPSHGSFFDYW

SEQ ID NO: 45943 - protein, 17 aa, Homo sapiens
CARDFGRMIAGSYFNFW

SEQ ID NO: 45944 - protein, 17 aa, Homo sapiens
CARGPGRGDKSASFDFW

SEQ ID NO: 45945 - protein, 21 aa, Homo sapiens
CARDIYLEYSSSLYFYYLDIW

SEQ ID NO: 45946 - protein, 18 aa, Homo sapiens
CARVGGYGSGTGHWFDPW

SEQ ID NO: 45947 - protein, 17 aa, Homo sapiens
CARGTGDHRYTYGFDYW

SEQ ID NO: 45948 - protein, 19 aa, Homo sapiens
CARDKISDLWSAFSYMDIW

SEQ ID NO: 45949 - protein, 13 aa, Homo sapiens
CARDPNDRLHDYW

SEQ ID NO: 45950 - protein, 16 aa, Homo sapiens
CARDSVRSIAADFDYW

SEQ ID NO: 45951 - protein, 22 aa, Homo sapiens
CARHFKLSSSVDIYSSSSFDFW

SEQ ID NO: 45952 - protein, 19 aa, Homo sapiens
CARDGVPWTMIRGLILDYW

SEQ ID NO: 45953 - protein, 25 aa, Homo sapiens
CARHIPHAPHCGRVSCYNFYYMDVW

SEQ ID NO: 45954 - protein, 20 aa, Homo sapiens
CARDGKYYGSGTYTYYFDYW

SEQ ID NO: 45955 - protein, 23 aa, Homo sapiens
CTRATDLLCSGGTCYSGRTFDYW

SEQ ID NO: 45956 - protein, 13 aa, Homo sapiens
CAREGGHEFFQHW

SEQ ID NO: 45957 - protein, 17 aa, Homo sapiens
CASEHGYGPGSQVFDYW

SEQ ID NO: 45958 - protein, 19 aa, Homo sapiens
CALPISLNYGDYYSWFDPW

SEQ ID NO: 45959 - protein, 12 aa, Homo sapiens
CQHYNDWPQWTF

SEQ ID NO: 45960 - protein, 17 aa, Homo sapiens
CARTFEYAISSGWFDPW

SEQ ID NO: 45961 - protein, 15 aa, Homo sapiens
CARPYWYDSSGFDHW

SEQ ID NO: 45962 - protein, 19 aa, Homo sapiens
CARHSGGGPRSGPRDFDYW

SEQ ID NO: 45963 - protein, 23 aa, Homo sapiens
CARGRTEIYSYGSLRRYYYMDVW

SEQ ID NO: 45964 - protein, 19 aa, Homo sapiens
CATDRPGKQWLLPYYFEKW

SEQ ID NO: 45965 - protein, 13 aa, Homo sapiens
CARRLVPGPFDLW

SEQ ID NO: 45966 - protein, 18 aa, Homo sapiens
CARTGDMVRGVIRGFDYW

SEQ ID NO: 45967 - protein, 15 aa, Homo sapiens
CAKDLYTSPGWGDSW

SEQ ID NO: 45968 - protein, 18 aa, Homo sapiens
CVKRGGRGSSWYNWFDPW

SEQ ID NO: 45969 - protein, 17 aa, Homo sapiens
CARRDVYKAALWYLDLW

SEQ ID NO: 45970 - protein, 22 aa, Homo sapiens
CARDGLVAYREIVVVITNIDYW

SEQ ID NO: 45971 - protein, 22 aa, Homo sapiens
CASTSTTYYYDSRGYYSAFDIW

SEQ ID NO: 45972 - protein, 19 aa, Homo sapiens
CAKDYGPSGAADPYYFDSW

SEQ ID NO: 45973 - protein, 20 aa, Homo sapiens
CAKDIGIAVAAAGAFGIDYW

SEQ ID NO: 45974 - protein, 15 aa, Homo sapiens
CARGGGYSYGAIDYW

SEQ ID NO: 45975 - protein, 18 aa, Homo sapiens
CAKGLDPLVVVTGMFDYW

SEQ ID NO: 45976 - protein, 17 aa, Homo sapiens
CARDRDRSSWYRLFDLW

SEQ ID NO: 45977 - protein, 13 aa, Homo sapiens
CSSVDTSIPFDYW

SEQ ID NO: 45978 - protein, 17 aa, Homo sapiens
CAKEAVYDSDDKPFDYW

SEQ ID NO: 45979 - protein, 19 aa, Homo sapiens
CARDHRIYYYDRSGYGVYW

SEQ ID NO: 45980 - protein, 17 aa, Homo sapiens
CAKAWLREQQLVPFDSW

SEQ ID NO: 45981 - protein, 15 aa, Homo sapiens
CAKALMWELLGFDYW

SEQ ID NO: 45982 - protein, 20 aa, Homo sapiens
CARSDGSGSWGPPSYYFDLW

SEQ ID NO: 45983 - protein, 16 aa, Homo sapiens
CAGLDSSSSGGWFDPW

SEQ ID NO: 45984 - protein, 17 aa, Homo sapiens
CARDFFGSGTLGAFDIW

SEQ ID NO: 45985 - protein, 15 aa, Homo sapiens
CAKGSEGMPSWFAPW

SEQ ID NO: 45986 - protein, 18 aa, Homo sapiens
CARGPGDYQSPNSWFDPW

SEQ ID NO: 45987 - protein, 17 aa, Homo sapiens
CARSADYYDILTPFDYW

SEQ ID NO: 45988 - protein, 14 aa, Homo sapiens
CVKEGNTGTQYDYW

SEQ ID NO: 45989 - protein, 18 aa, Homo sapiens
CARGLVRDFVQPEAFDIW

SEQ ID NO: 45990 - protein, 19 aa, Homo sapiens
CARARAEGNSWSGDYFDSW

SEQ ID NO: 45991 - protein, 15 aa, Homo sapiens
CLKSVGYYAYYTDVW

SEQ ID NO: 45992 - protein, 18 aa, Homo sapiens
CASVQRQTESYFTYFDSW

SEQ ID NO: 45993 - protein, 19 aa, Homo sapiens
CAKRNEYFGSGTFYSFDQW

SEQ ID NO: 45994 - protein, 18 aa, Homo sapiens
CASLSFDIFTYSGWFDPW

SEQ ID NO: 45995 - protein, 18 aa, Homo sapiens
CAHSEHDILTGYREFDLW

SEQ ID NO: 45996 - protein, 17 aa, Homo sapiens
CARPDSHFDWLLSFDSW

SEQ ID NO: 45997 - protein, 14 aa, Homo sapiens
CAKDGSGGGYFEYW

SEQ ID NO: 45998 - protein, 13 aa, Homo sapiens
CHSPDSSGSYEVF

SEQ ID NO: 45999 - protein, 12 aa, Homo sapiens
CQQYSGSPPYNF

SEQ ID NO: 46000 - protein, 19 aa, Homo sapiens
CARAHPQGASGYEPYFDTW

SEQ ID NO: 46001 - protein, 22 aa, Homo sapiens
CARAILVPCSSISCLHYYMDVW

SEQ ID NO: 46002 - protein, 21 aa, Homo sapiens
CATVRTPGYSSSWNSDYFQSW

SEQ ID NO: 46003 - protein, 18 aa, Homo sapiens
CARDKSTVTTHLQVFDPW

SEQ ID NO: 46004 - protein, 20 aa, Homo sapiens
CARIIWEPLIGGDFYYMDVW

SEQ ID NO: 46005 - protein, 12 aa, Homo sapiens
CARDKNTYFDHW

SEQ ID NO: 46006 - protein, 18 aa, Homo sapiens
CALYHDSTGYAPGAFDIW

SEQ ID NO: 46007 - protein, 20 aa, Homo sapiens
CASATRVVVTPVYYYYMDVW

SEQ ID NO: 46008 - protein, 13 aa, Homo sapiens
CARDREWVQGDYW

SEQ ID NO: 46009 - protein, 26 aa, Homo sapiens
CARDILLVPIDVPRGGDTYSYYLDVW

SEQ ID NO: 46010 - protein, 11 aa, Homo sapiens
CLQSESFPLAF

SEQ ID NO: 46011 - protein, 15 aa, Homo sapiens
CTRAHSSAWYPYDYW

SEQ ID NO: 46012 - protein, 20 aa, Homo sapiens
CATTPAWGSYRRYYYYMDVW

SEQ ID NO: 46013 - protein, 22 aa, Homo sapiens
CARGKRTFGAVIVSPFDAFDIW

SEQ ID NO: 46014 - protein, 18 aa, Homo sapiens
CARGDYGDFVSDWYFDLW

SEQ ID NO: 46015 - protein, 21 aa, Homo sapiens
CARADGTYYDILTGRNPIDYW

SEQ ID NO: 46016 - protein, 16 aa, Homo sapiens
CARRYNNYEVSYLDPW

SEQ ID NO: 46017 - protein, 17 aa, Homo sapiens
CAKDLWIAARLPWFDPW

SEQ ID NO: 46018 - protein, 21 aa, Homo sapiens
CARHGYGSYDSRGYKMIFDVW

SEQ ID NO: 46019 - protein, 22 aa, Homo sapiens
CARELPASYSSGSGMGQYFDFW

SEQ ID NO: 46020 - protein, 14 aa, Homo sapiens
CANLMGLTSDFDYW

SEQ ID NO: 46021 - protein, 18 aa, Homo sapiens
CARHGRMIVAQREYFDYW

SEQ ID NO: 46022 - protein, 22 aa, Homo sapiens
CAKGSDYFGSGSRFDFYYMDVW

SEQ ID NO: 46023 - protein, 20 aa, Homo sapiens
CVRDPGGGSGRYGDNWFDPW

SEQ ID NO: 46024 - protein, 21 aa, Homo sapiens
CASDFNDYVWGGYRDGAFDIW

SEQ ID NO: 46025 - protein, 21 aa, Homo sapiens
CARPVSRDPYDILTGHYLDNW

SEQ ID NO: 46026 - protein, 22 aa, Homo sapiens
CARGVVPWERGGAWTTGALDYW

SEQ ID NO: 46027 - protein, 18 aa, Homo sapiens
CVREAEMTTVTTDAFDIW

SEQ ID NO: 46028 - protein, 14 aa, Homo sapiens
CTREWEFGAGFDFW

SEQ ID NO: 46029 - protein, 19 aa, Homo sapiens
CTRVPPPWTGDRREAFDVW

SEQ ID NO: 46030 - protein, 24 aa, Homo sapiens
CATERERTDTYFYDSRSSTQFDYW

SEQ ID NO: 46031 - protein, 13 aa, Homo sapiens
CASGAGYDAFDFW

SEQ ID NO: 46032 - protein, 14 aa, Homo sapiens
CASLKVRGPSLDYW

SEQ ID NO: 46033 - protein, 17 aa, Homo sapiens
CARRAVVVSAIPAFNIW

SEQ ID NO: 46034 - protein, 17 aa, Homo sapiens
CARPDGAIAYLRSFAYW

SEQ ID NO: 46035 - protein, 22 aa, Homo sapiens
CVRGASSSGWYGGENYYYMDVW

SEQ ID NO: 46036 - protein, 15 aa, Homo sapiens
CAKDVVATPTLFDYW

SEQ ID NO: 46037 - protein, 17 aa, Homo sapiens
CATLTTLPTGKYYMDVW

SEQ ID NO: 46038 - protein, 12 aa, Homo sapiens
CVMYMGGGISIF

SEQ ID NO: 46039 - protein, 17 aa, Homo sapiens
CARGVPGTREYNWFGPW

SEQ ID NO: 46040 - protein, 20 aa, Homo sapiens
CARLGPSGLQNTRFSKIDYW

SEQ ID NO: 46041 - protein, 15 aa, Homo sapiens
CAKDTSGGFNWLDPW

SEQ ID NO: 46042 - protein, 16 aa, Homo sapiens
CAHEISRVREVYFDYW

SEQ ID NO: 46043 - protein, 17 aa, Homo sapiens
CAKGGDYFDSSAGFDFW

SEQ ID NO: 46044 - protein, 17 aa, Homo sapiens
CARPGLSVSRLHPFDLW

SEQ ID NO: 46045 - protein, 23 aa, Homo sapiens
CVKDNRAEGMYYYDTSGHGFDVW

SEQ ID NO: 46046 - protein, 16 aa, Homo sapiens
CARDRENSASGLFAYW

SEQ ID NO: 46047 - protein, 13 aa, Homo sapiens [sequence omitted]

SEQ ID NO: 46048 - protein, 18 aa, Homo sapiens
CAKGGNSYGLINDAFDIW

SEQ ID NO: 46049 - protein, 22 aa, Homo sapiens
CARDLHEQFLERLLPYLAFDIW

SEQ ID NO: 46050 - protein, 14 aa, Homo sapiens
CARISPYREFFDYW

SEQ ID NO: 46051 - protein, 14 aa, Homo sapiens
CAKDDDYQLLFRYW

SEQ ID NO: 46052 - protein, 12 aa, Homo sapiens
CMQTLQIPMYSF

SEQ ID NO: 46053 - protein, 22 aa, Homo sapiens
CARESSIDYGDYVYDPGYFDFW

SEQ ID NO: 46054 - protein, 15 aa, Homo sapiens
CANYRIVGAWYMDVW

SEQ ID NO: 46055 - protein, 15 aa, Homo sapiens
CASSRDGYNERLDYW

SEQ ID NO: 46056 - protein, 18 aa, Homo sapiens
CARDGASGIMVAGYYDYW

SEQ ID NO: 46057 - protein, 23 aa, Homo sapiens
CARDFNSLGVEWPAYPLYYMDVW

SEQ ID NO: 46058 - protein, 16 aa, Homo sapiens
CASELATVTRGGFEYW

SEQ ID NO: 46059 - protein, 20 aa, Homo sapiens
CASHFRPVGFYDPSGHFDYW

SEQ ID NO: 46060 - protein, 19 aa, Homo sapiens
CASPFSSSPAYYDYYMDVW

SEQ ID NO: 46061 - protein, 16 aa, Homo sapiens
CAGGARWEVPDAFDIW

SEQ ID NO: 46062 - protein, 19 aa, Homo sapiens
CAKEEMRLFVHSGSYIDYW

SEQ ID NO: 46063 - protein, 19 aa, Homo sapiens
CTRDLYYYVSGSHDRFDQW

SEQ ID NO: 46064 - protein, 18 aa, Homo sapiens
CAKEWALASGRSLDFDYW

SEQ ID NO: 46065 - protein, 16 aa, Homo sapiens
CATSYSYDSSGYCYYW

SEQ ID NO: 46066 - protein, 18 aa, Homo sapiens
CATLYYDYGGYHDAFDIW

SEQ ID NO: 46067 - protein, 11 aa, Homo sapiens
CHQYKSYSWAF

SEQ ID NO: 46068 - protein, 16 aa, Homo sapiens
CALVEGSSSDYSLDYW

SEQ ID NO: 46069 - protein, 19 aa, Homo sapiens
CARGEGRRPTSLVTPADYW

SEQ ID NO: 46070 - protein, 26 aa, Homo sapiens
CARVPGRAAAGPKTKNYYYYFYMDVW

SEQ ID NO: 46071 - protein, 14 aa, Homo sapiens
CARVLRVIMGFDFW

SEQ ID NO: 46072 - protein, 18 aa, Homo sapiens
CAKARPDYGDYADAFDVW

SEQ ID NO: 46073 - protein, 17 aa, Homo sapiens
CARGRTTGYYPYYFDYW

SEQ ID NO: 46074 - protein, 22 aa, Homo sapiens
CAKEINDDNVHHYYHFYYMDVW

SEQ ID NO: 46075 - protein, 16 aa, Homo sapiens
CAKDRWELLRYYFQYW

SEQ ID NO: 46076 - protein, 16 aa, Homo sapiens
CARPRTTVTTGYLDYW

SEQ ID NO: 46077 - protein, 15 aa, Homo sapiens
CAKATALTFGGVDYW

SEQ ID NO: 46078 - protein, 21 aa, Homo sapiens
CVRGGKYQLLLNFYSYYMDVW

SEQ ID NO: 46079 - protein, 14 aa, Homo sapiens
CARIESTVSQFDYW

SEQ ID NO: 46080 - protein, 18 aa, Homo sapiens
CVRDVGDIAVVPTVFEYW

SEQ ID NO: 46081 - protein, 17 aa, Homo sapiens
CAKVVDLFQWADAFDMW

SEQ ID NO: 46082 - protein, 18 aa, Homo sapiens
CARGRNFRYAGNTHFDSW

SEQ ID NO: 46083 - protein, 16 aa, Homo sapiens
CAQTVDSSSWSPFDKW

SEQ ID NO: 46084 - protein, 17 aa, Homo sapiens
CAKDRNYYGSGAGFDYW

SEQ ID NO: 46085 - protein, 20 aa, Homo sapiens
CARHRAFGSRRRYYYYMDVW

SEQ ID NO: 46086 - protein, 18 aa, Homo sapiens
CAKAGYCTGGPCHTFDFW

SEQ ID NO: 46087 - protein, 28 aa, Homo sapiens
CARDQSTDYDILTAYYLSYYYSYYMDVW

SEQ ID NO: 46088 - protein, 17 aa, Homo sapiens
CARQVATMREWRAFDIW

SEQ ID NO: 46089 - protein, 20 aa, Homo sapiens
CARLGGFQVYYDSSGYFVDW

SEQ ID NO: 46090 - protein, 20 aa, Homo sapiens
CAREHVDTAVGYYQWFFDYW

SEQ ID NO: 46091 - protein, 21 aa, Homo sapiens
CASDGVYGSGSSDRHDAFDIW

SEQ ID NO: 46092 - protein, 25 aa, Homo sapiens
CAKRGYDSSGYRLFASLRGGYFDYW

SEQ ID NO: 46093 - protein, 16 aa, Homo sapiens
CARDLREMGKDAFDIW

SEQ ID NO: 46094 - protein, 19 aa, Homo sapiens
CARHPDYSGNTENPWFDSW

SEQ ID NO: 46095 - protein, 18 aa, Homo sapiens
CVRLGNGWVGPNNYFDPW

SEQ ID NO: 46096 - protein, 18 aa, Homo sapiens
CARAASLGWELLPAFDYW

SEQ ID NO: 46097 - protein, 17 aa, Homo sapiens
CARHPDDYGSVSYFSWW

SEQ ID NO: 46098 - protein, 19 aa, Homo sapiens
CARLPFEDFYDSSGYYDYW

SEQ ID NO: 46099 - protein, 19 aa, Homo sapiens
CARAYYYESSGYLIYFDHW

SEQ ID NO: 46100 - protein, 22 aa, Homo sapiens
CARELSYYYDSGGYYYGYFQYW

SEQ ID NO: 46101 - protein, 21 aa, Homo sapiens
CARDRSDPTVTGYYYYYMDVW

SEQ ID NO: 46102 - protein, 16 aa, Homo sapiens
CAKSMSSGYGYWFDSW

SEQ ID NO: 46103 - protein, 23 aa, Homo sapiens
CARDSHHDFWKGKPHFYYYMDVW

SEQ ID NO: 46104 - protein, 14 aa, Homo sapiens
CTRQNKVVGIHDYW

SEQ ID NO: 46105 - protein, 16 aa, Homo sapiens
CARPDPTYSSVAFDIW

SEQ ID NO: 46106 - protein, 20 aa, Homo sapiens
CARLTAVTEDTRSEFWFDPW

SEQ ID NO: 46107 - protein, 17 aa, Homo sapiens
CARNRNLLTGWGWFDPW

SEQ ID NO: 46108 - protein, 16 aa, Homo sapiens
CATDYGGNGEWACDIW

SEQ ID NO: 46109 - protein, 18 aa, Homo sapiens
CTTVGIEVVTAIPNFDFW

SEQ ID NO: 46110 - protein, 14 aa, Homo sapiens
CVRRTPQAQYFQSW

SEQ ID NO: 46111 - protein, 19 aa, Homo sapiens
CARALAARPSRGTLYMDVW

SEQ ID NO: 46112 - protein, 16 aa, Homo sapiens
CARDQDYGGNSDFGYW

SEQ ID NO: 46113 - protein, 23 aa, Homo sapiens
CARLSTDSSYHYPWYYYYYMDVW

SEQ ID NO: 46114 - protein, 16 aa, Homo sapiens
CAKDIRETLYSAFDYW

SEQ ID NO: 46115 - protein, 12 aa, Homo sapiens
CTTDRLDSTDYW

SEQ ID NO: 46116 - protein, 11 aa, Homo sapiens
CARGMFSFDTW

SEQ ID NO: 46117 - protein, 21 aa, Homo sapiens
CARHQGSRDYLWGTYREFDYW

SEQ ID NO: 46118 - protein, 24 aa, Homo sapiens
CARPQWPRPDIARRPWALYYMDVW

SEQ ID NO: 46119 - protein, 13 aa, Homo sapiens
CMQDTHFPHSVTF

SEQ ID NO: 46120 - protein, 19 aa, Homo sapiens
CARGVTSSRSDYYYYMDVW

SEQ ID NO: 46121 - protein, 21 aa, Homo sapiens
CASLSSTPSIRLEGEDAFDIW

SEQ ID NO: 46122 - protein, 19 aa, Homo sapiens
CARDWGHCSGDSCYYFDYW

SEQ ID NO: 46123 - protein, 19 aa, Homo sapiens
CVRGPLTMTVDVGEAFDIW

SEQ ID NO: 46124 - protein, 19 aa, Homo sapiens
CARGGAAAYQVSPRSFDPW

SEQ ID NO: 46125 - protein, 19 aa, Homo sapiens
CANGPNYGAIESLAPFDVW

SEQ ID NO: 46126 - protein, 18 aa, Homo sapiens
CARRIGTAGRRGRWFDPW

SEQ ID NO: 46127 - protein, 17 aa, Homo sapiens
CARSVNSAFYVGAFDIW

SEQ ID NO: 46128 - protein, 16 aa, Homo sapiens
CAKDPNYGDYNHFDSW

SEQ ID NO: 46129 - protein, 19 aa, Homo sapiens
CARHARIGYSGTDFWFDLW

SEQ ID NO: 46130 - protein, 16 aa, Homo sapiens
CGREGIAPAADYMDIW

SEQ ID NO: 46131 - protein, 17 aa, Homo sapiens
CARDPLYASGRGYFDYW

SEQ ID NO: 46132 - protein, 25 aa, Homo sapiens
CARNPDYYGSGSYYSVSYYYYMDVW

SEQ ID NO: 46133 - protein, 19 aa, Homo sapiens
CAKDMPGFSSGWSFAFDIW

SEQ ID NO: 46134 - protein, 13 aa, Homo sapiens
CQSYDSNIQEVVF

SEQ ID NO: 46135 - protein, 19 aa, Homo sapiens
CARDRVHREEYFSYYMDVW

SEQ ID NO: 46136 - protein, 17 aa, Homo sapiens
CTKDKVRWELSEGFDQW

SEQ ID NO: 46137 - protein, 21 aa, Homo sapiens
CARQRSAQQVHRSRYYYMDVW

SEQ ID NO: 46138 - protein, 19 aa, Homo sapiens
CAKAARLHCGTRSCYLDSW

SEQ ID NO: 46139 - protein, 18 aa, Homo sapiens
CARAGYSFGHVEGAFDIW

SEQ ID NO: 46140 - protein, 17 aa, Homo sapiens
CARSQGYSYGDPNFDYW

SEQ ID NO: 46141 - protein, 17 aa, Homo sapiens
CARAVHYYDTSAYYQYW

SEQ ID NO: 46142 - protein, 17 aa, Homo sapiens
CARHIDYTPAHNWFDPW

SEQ ID NO: 46143 - protein, 15 aa, Homo sapiens
CARGYNFWSGNYDYW

SEQ ID NO: 46144 - protein, 19 aa, Homo sapiens
CTRDLTVIVVIANHAFDIW

SEQ ID NO: 46145 - protein, 19 aa, Homo sapiens
CTREPREEYTSSWYSFDYW

SEQ ID NO: 46146 - protein, 25 aa, Homo sapiens
CARHVYFDSSDNYHYPGYYYYMDVW

SEQ ID NO: 46147 - protein, 20 aa, Homo sapiens
CARGPYYYASEMGPNYFDYW

SEQ ID NO: 46148 - protein, 14 aa, Homo sapiens
CATLDLGEDGFDIW

SEQ ID NO: 46149 - protein, 16 aa, Homo sapiens
CARDYTTTSLHWFDAW

SEQ ID NO: 46150 - protein, 19 aa, Homo sapiens
CAKERVDKAMVVGDGFDIW

SEQ ID NO: 46151 - protein, 19 aa, Homo sapiens
CAKEPEITCRSPTCPIDYW

SEQ ID NO: 46152 - protein, 21 aa, Homo sapiens
CAKAVTGSTRGNYYYHYMDVW

SEQ ID NO: 46153 - protein, 22 aa, Homo sapiens
CTRDRLVWFGEFGEVLPGIDYW

SEQ ID NO: 46154 - protein, 19 aa, Homo sapiens
CARWYYGSGNYYPSYFDYW

SEQ ID NO: 46155 - protein, 19 aa, Homo sapiens
CARDHLPGTLNYYYYMDVW

SEQ ID NO: 46156 - protein, 23 aa, Homo sapiens
CARRLGRYYYDSSGYYYDAFDIW

SEQ ID NO: 46157 - protein, 14 aa, Homo sapiens
CAREVGPVAVLDYW

SEQ ID NO: 46158 - protein, 16 aa, Homo sapiens
CAKDPGTMILNAFDSW

SEQ ID NO: 46159 - protein, 18 aa, Homo sapiens
CSRGLAAAVRGHTWFDPW

SEQ ID NO: 46160 - protein, 18 aa, Homo sapiens
CARTKYSSSWYPDAFDIW

SEQ ID NO: 46161 - protein, 21 aa, Homo sapiens
CARALIYYDSSGSKENYFDYW

SEQ ID NO: 46162 - protein, 16 aa, Homo sapiens
CATQTYCDSTSCYDYW

SEQ ID NO: 46163 - protein, 13 aa, Homo sapiens
CGKENYYYYMDVW

SEQ ID NO: 46164 - protein, 16 aa, Homo sapiens
CAKAHSSSWNDGFDIW

SEQ ID NO: 46165 - protein, 17 aa, Homo sapiens
CAKGRGLAVAGNYFDYW

SEQ ID NO: 46166 - protein, 18 aa, Homo sapiens
CARSYYYGLGAGDYFDYW

SEQ ID NO: 46167 - protein, 15 aa, Homo sapiens
CATSAHPRIYYFDYW

SEQ ID NO: 46168 - protein, 15 aa, Homo sapiens
CAKDILSDLSVFDMW

SEQ ID NO: 46169 - protein, 17 aa, Homo sapiens
CARLYHPVAGPPYFDYW

SEQ ID NO: 46170 - protein, 21 aa, Homo sapiens
CTKDVGGVPTVRGVLPLFEYW

SEQ ID NO: 46171 - protein, 13 aa, Homo sapiens
CVKWAFYYGFDPW

SEQ ID NO: 46172 - protein, 17 aa, Homo sapiens
CARFGPEDYYYYYMNVW

SEQ ID NO: 46173 - protein, 16 aa, Homo sapiens
CCTSYYDDHLYFFDYW

SEQ ID NO: 46174 - protein, 21 aa, Homo sapiens
CTRHLDTHYDFLTAPRGLDYW

SEQ ID NO: 46175 - protein, 13 aa, Homo sapiens
CAKEGSLDPFDHW

SEQ ID NO: 46176 - protein, 20 aa, Homo sapiens
CAKDPVTGHSSGWYNWVDPW

SEQ ID NO: 46177 - protein, 22 aa, Homo sapiens
CARVALVYCGSACYEYYYKDVW

SEQ ID NO: 46178 - protein, 21 aa, Homo sapiens
CARYPIYYDSFGYYYFHFDSW

SEQ ID NO: 46179 - protein, 19 aa, Homo sapiens
CAGAVRSDNGWAHRPVDYW

SEQ ID NO: 46180 - protein, 16 aa, Homo sapiens
CARDFGRYGEMTVDYW

SEQ ID NO: 46181 - protein, 11 aa, Homo sapiens
CQQYIYWPVQF

SEQ ID NO: 46182 - protein, 18 aa, Homo sapiens
CAKDGSSRPTSLRPIDYW

SEQ ID NO: 46183 - protein, 11 aa, Homo sapiens
CQHYYSNPYSF

SEQ ID NO: 46184 - protein, 17 aa, Homo sapiens
CARRSLWDSYGYSHDYW

SEQ ID NO: 46185 - protein, 18 aa, Homo sapiens
CARAYSYGSKRKYYFDYW

SEQ ID NO: 46186 - protein, 13 aa, Homo sapiens
CMQATQFPPMYIF

SEQ ID NO: 46187 - protein, 17 aa, Homo sapiens
CARDTVVVGAARGFDYW

SEQ ID NO: 46188 - protein, 18 aa, Homo sapiens
CVTVPLCGGDCPHAFDMW

SEQ ID NO: 46189 - protein, 17 aa, Homo sapiens
CARGEGSGYFAKYFQHW

SEQ ID NO: 46190 - protein, 20 aa, Homo sapiens
CADKGVSTSSYKSQDAFDVW

SEQ ID NO: 46191 - protein, 18 aa, Homo sapiens
CATTFRKYSSNWYSFDFW

SEQ ID NO: 46192 - protein, 22 aa, Homo sapiens
CAKDRREMMVNTGYYYYYMDVW

SEQ ID NO: 46193 - protein, 17 aa, Homo sapiens
CATIHRYDSSGYKSDYW

SEQ ID NO: 46194 - protein, 22 aa, Homo sapiens
CAIGPLVGFGESPGYYYYMDVW

SEQ ID NO: 46195 - protein, 16 aa, Homo sapiens
CAKRVDRSDYTPFDYW

SEQ ID NO: 46196 - protein, 15 aa, Homo sapiens
CVRSKVAGTYYFESW

SEQ ID NO: 46197 - protein, 18 aa, Homo sapiens
CANIGRVGYGDYGSIDYW

SEQ ID NO: 46198 - protein, 19 aa, Homo sapiens
CARGGYYDSTGYSYPSDYW

SEQ ID NO: 46199 - protein, 22 aa, Homo sapiens
CARVGYYYDDSGSYGGYYFDSW

SEQ ID NO: 46200 - protein, 12 aa, Homo sapiens [sequence omitted]

SEQ ID NO: 46201 - protein, 20 aa, Homo sapiens
CARTITMVRGVIRFYYMDVW

SEQ ID NO: 46202 - protein, 17 aa, Homo sapiens
CARQGKTATGTKYFDYW

SEQ ID NO: 46203 - protein, 15 aa, Homo sapiens
CAVLASYGDYTFDYW

SEQ ID NO: 46204 - protein, 15 aa, Homo sapiens
CASASIGDYDAFDIW

SEQ ID NO: 46205 - protein, 14 aa, Homo sapiens
CVRALAITLPFDYW

SEQ ID NO: 46206 - protein, 17 aa, Homo sapiens
CARAPDYGDRLNFFDYW

SEQ ID NO: 46207 - protein, 20 aa, Homo sapiens
CARELEGSVGMGVQKAFDLW

SEQ ID NO: 46208 - protein, 21 aa, Homo sapiens
CARAPDCSTIDCYVYPWFDPW

SEQ ID NO: 46209 - protein, 19 aa, Homo sapiens
CARGVLRYFDWLLTSFDYW

SEQ ID NO: 46210 - protein, 17 aa, Homo sapiens
CARDFSTRGVAGTFDYW

SEQ ID NO: 46211 - protein, 19 aa, Homo sapiens
CASSEFDGSGTYTDKLDYW

SEQ ID NO: 46212 - protein, 20 aa, Homo sapiens
CATETKYYDSVNYKGSLDYW

SEQ ID NO: 46213 - protein, 20 aa, Homo sapiens
CARPYYYDSSALLGDAFDIW

SEQ ID NO: 46214 - protein, 20 aa, Homo sapiens
CARDEYYYAGGAALYYFDYW

SEQ ID NO: 46215 - protein, 21 aa, Homo sapiens
CVRDGPQWLVKGYYYYYMDVW

SEQ ID NO: 46216 - protein, 14 aa, Homo sapiens
CASAYDISGYREYW

SEQ ID NO: 46217 - protein, 17 aa, Homo sapiens
CARGNRVEVAGLGADYW

SEQ ID NO: 46218 - protein, 18 aa, Homo sapiens
CARGKGMLITGYYYMDVW

SEQ ID NO: 46219 - protein, 13 aa, Homo sapiens
CAHMGQYSYEDYW

SEQ ID NO: 46220 - protein, 19 aa, Homo sapiens
CARAIDYGDLYFYYYLDVW

SEQ ID NO: 46221 - protein, 19 aa, Homo sapiens
CARGGFGYCSGGSCPVDYW

SEQ ID NO: 46222 - protein, 18 aa, Homo sapiens
CARGVGGVIAGLYYFDSW

SEQ ID NO: 46223 - protein, 14 aa, Homo sapiens
CQSSDTSLSGLYAF

SEQ ID NO: 46224 - protein, 17 aa, Homo sapiens
CARDVGIWGLIDYMDVW

SEQ ID NO: 46225 - protein, 18 aa, Homo sapiens
CAREVGYHWNDDPYFDYW

SEQ ID NO: 46226 - protein, 14 aa, Homo sapiens
CTTDGYNYVDFDNW

SEQ ID NO: 46227 - protein, 16 aa, Homo sapiens
CARGTSSQLKGGFDYW

SEQ ID NO: 46228 - protein, 20 aa, Homo sapiens
CARDDRSSILALGNYYMDVW

SEQ ID NO: 46229 - protein, 23 aa, Homo sapiens
CAKDRMRYTIMIFGSLSPAADYW

SEQ ID NO: 46230 - protein, 18 aa, Homo sapiens
CAKDPDPTGHSYGLFDSW

SEQ ID NO: 46231 - protein, 17 aa, Homo sapiens
CATGVAVAGTLSAFDYW

SEQ ID NO: 46232 - protein, 18 aa, Homo sapiens
CARAQAFNFWSGSSFDYW

SEQ ID NO: 46233 - protein, 22 aa, Homo sapiens
CARSPSKVTLIVRSSRYYFDYW

SEQ ID NO: 46234 - protein, 24 aa, Homo sapiens
CTTDLVLSDDYYDSSGYYRLFDYW

SEQ ID NO: 46235 - protein, 26 aa, Homo sapiens
CARDHFNHFHSSGYFSVHYYYYMDVW

SEQ ID NO: 46236 - protein, 16 aa, Homo sapiens
CAKRTYSSSHDAFDVW

SEQ ID NO: 46237 - protein, 14 aa, Homo sapiens
CAREISYGSATDYW

SEQ ID NO: 46238 - protein, 16 aa, Homo sapiens
CVRENGGNSQCYFDLW

SEQ ID NO: 46239 - protein, 20 aa, Homo sapiens
CARDVIAAKPGTPKDAFDVW

SEQ ID NO: 46240 - protein, 23 aa, Homo sapiens
CARGRRYFDWLPAYHYYYFMDVW

SEQ ID NO: 46241 - protein, 17 aa, Homo sapiens
CARVRGPGIAAAGQDYW

SEQ ID NO: 46242 - protein, 15 aa, Homo sapiens
CASSGWYRGSQFEYW

SEQ ID NO: 46243 - protein, 18 aa, Homo sapiens
CARAGLGEYNYGYDLDYW

SEQ ID NO: 46244 - protein, 18 aa, Homo sapiens
CARAPPPYGAHYYYMDVW

SEQ ID NO: 46245 - protein, 23 aa, Homo sapiens
CARLRARDTSIVPYYYHYYMDVW

SEQ ID NO: 46246 - protein, 17 aa, Homo sapiens
CARGMDYYYDSSGHDYW

SEQ ID NO: 46247 - protein, 16 aa, Homo sapiens
CAKVAAFFGVGAFDIW

SEQ ID NO: 46248 - protein, 18 aa, Homo sapiens
CAKDMRIAAAGTGGFDSW

SEQ ID NO: 46249 - protein, 21 aa, Homo sapiens
CAKDRVRLTSVIGTYGAFDVW

SEQ ID NO: 46250 - protein, 13 aa, Homo sapiens
CAREGTLYALDIW

SEQ ID NO: 46251 - protein, 17 aa, Homo sapiens
CASRESRRYNFDYIDVW

SEQ ID NO: 46252 - protein, 16 aa, Homo sapiens
CASPSIPYLSYYFDYW

SEQ ID NO: 46253 - protein, 16 aa, Homo sapiens
CARGGYIGSQDAFDMW

SEQ ID NO: 46254 - protein, 15 aa, Homo sapiens
CARASMTDAHYFDYW

SEQ ID NO: 46255 - protein, 20 aa, Homo sapiens
CARGIRGVVIVYYFHYMDVW

SEQ ID NO: 46256 - protein, 20 aa, Homo sapiens
CSRHKTLPFGDSPSSSFDFW

SEQ ID NO: 46257 - protein, 17 aa, Homo sapiens
CAKEGYNGHNRGSFDSW

SEQ ID NO: 46258 - protein, 16 aa, Homo sapiens
CATRKGTRRMSHFDYW

SEQ ID NO: 46259 - protein, 15 aa, Homo sapiens
CARVKVIQRRHFDYW

SEQ ID NO: 46260 - protein, 17 aa, Homo sapiens
CAKQDGYNYYFNWFDPW

SEQ ID NO: 46261 - protein, 13 aa, Homo sapiens
CQQSDNFPPMHSF

SEQ ID NO: 46262 - protein, 21 aa, Homo sapiens
CARYRDYDVLTGYSIHFFDSW

SEQ ID NO: 46263 - protein, 18 aa, Homo sapiens
CARERKLATIKSSWFDPW

SEQ ID NO: 46264 - protein, 13 aa, Homo sapiens
CQQYRNWPQVDSF

SEQ ID NO: 46265 - protein, 18 aa, Homo sapiens
CARGWIQLWSRYNWFDPW

SEQ ID NO: 46266 - protein, 17 aa, Homo sapiens
CVRESTSATNGDTFDIW

SEQ ID NO: 46267 - protein, 22 aa, Homo sapiens
CARDRGSCGGGNCYRPYYFDYW

SEQ ID NO: 46268 - protein, 19 aa, Homo sapiens
CARGFSGYDRFRAFHFDYW

SEQ ID NO: 46269 - protein, 23 aa, Homo sapiens
CAREVSALADYGVLQEDNWFDPW

SEQ ID NO: 46270 - protein, 21 aa, Homo sapiens
CASMREYHLWPYGSGSYCDYW

SEQ ID NO: 46271 - protein, 18 aa, Homo sapiens
CARVFGVAPGAIEYFDFW

SEQ ID NO: 46272 - protein, 19 aa, Homo sapiens
CARVPSPLYDNVTAYYDYW

SEQ ID NO: 46273 - protein, 19 aa, Homo sapiens
CARGRHYYDNGGYHRFDYW

SEQ ID NO: 46274 - protein, 16 aa, Homo sapiens
CARDGGSNPRDAFDIW

SEQ ID NO: 46275 - protein, 17 aa, Homo sapiens
CARGRQFLEWLPHFEYW

SEQ ID NO: 46276 - protein, 16 aa, Homo sapiens
CARLGWGSSRGWFDPW

SEQ ID NO: 46277 - protein, 22 aa, Homo sapiens
CARETSDYVWGSYSPPYYFDYW

SEQ ID NO: 46278 - protein, 16 aa, Homo sapiens
CAKSVALAGFWYYDFW

SEQ ID NO: 46279 - protein, 15 aa, Homo sapiens
CAREPDDYGDFSDYW

SEQ ID NO: 46280 - protein, 21 aa, Homo sapiens
CARDIAGYTADGGYDFCFDYW

SEQ ID NO: 46281 - protein, 12 aa, Homo sapiens
CAREIWYRLDYW

SEQ ID NO: 46282 - protein, 23 aa, Homo sapiens
CARVQDQSYYYDLSTNYPNFDYW

SEQ ID NO: 46283 - protein, 15 aa, Homo sapiens
CAQAPGGSWWHFDLW

SEQ ID NO: 46284 - protein, 21 aa, Homo sapiens
CAKDSTYNYYYDSSAYYFDSW

SEQ ID NO: 46285 - protein, 12 aa, Homo sapiens
CGTWDSNVSALF

SEQ ID NO: 46286 - protein, 21 aa, Homo sapiens
CARGDHYDILTGYSYYYMDVW

SEQ ID NO: 46287 - protein, 17 aa, Homo sapiens
CARKWGSGWNTHYFDYW

SEQ ID NO: 46288 - protein, 16 aa, Homo sapiens
CARSLVRGAPSPFEYW

SEQ ID NO: 46289 - protein, 21 aa, Homo sapiens
CARDIPLWLQGNYFYYYMDVW

SEQ ID NO: 46290 - protein, 23 aa, Homo sapiens
CAKAGAFGELFPPFYYYYYMDVW

SEQ ID NO: 46291 - protein, 20 aa, Homo sapiens
CARGLYVEYYYGEHHYMDVW

SEQ ID NO: 46292 - protein, 23 aa, Homo sapiens
CARVVSFREFRGVIPSGYYMDVW

SEQ ID NO: 46293 - protein, 20 aa, Homo sapiens
CARDPSPSYGSFRRYYFDYW

SEQ ID NO: 46294 - protein, 17 aa, Homo sapiens
CARTRPGYFDWSHFDLW

SEQ ID NO: 46295 - protein, 18 aa, Homo sapiens
CTAGGPGSGSRAFGFDPW

SEQ ID NO: 46296 - protein, 21 aa, Homo sapiens
CARDFPGVRFGELLGGVFDYW

SEQ ID NO: 46297 - protein, 14 aa, Homo sapiens
CARGIANNRVFDSW

SEQ ID NO: 46298 - protein, 15 aa, Homo sapiens
CARHPPGYGSGPDYW

SEQ ID NO: 46299 - protein, 19 aa, Homo sapiens
CARSGYDRSGYYVDPSDYW

SEQ ID NO: 46300 - protein, 21 aa, Homo sapiens
CATVYRDYDYVWGDRDAFDMW

SEQ ID NO: 46301 - protein, 16 aa, Homo sapiens
CARRKGEYSSQYMDVW

SEQ ID NO: 46302 - protein, 20 aa, Homo sapiens
CAKDKYYYDSTGNDDPFDYW

SEQ ID NO: 46303 - protein, 17 aa, Homo sapiens
CARGIGGLKELRIFDYW

SEQ ID NO: 46304 - protein, 18 aa, Homo sapiens
CARIPGGGRTTGTTFDSW

SEQ ID NO: 46305 - protein, 17 aa, Homo sapiens
CAKDISQRVRGVMFDFW

SEQ ID NO: 46306 - protein, 12 aa, Homo sapiens
CETWDTNSHKVF

SEQ ID NO: 46307 - protein, 15 aa, Homo sapiens
CARREWFVINAYDIW

SEQ ID NO: 46308 - protein, 21 aa, Homo sapiens
CARVGSFDRSDSYYDPFFDEW

SEQ ID NO: 46309 - protein, 21 aa, Homo sapiens
CARGRSYCTSLTCYPHPFDDW

SEQ ID NO: 46310 - protein, 17 aa, Homo sapiens
CARVAYSSGWYGHFDYW

SEQ ID NO: 46311 - protein, 18 aa, Homo sapiens
CVKDITRGYDYVWHFDLW

SEQ ID NO: 46312 - protein, 18 aa, Homo sapiens
CARVGLLFATRAYYMDVW

SEQ ID NO: 46313 - protein, 18 aa, Homo sapiens
CARGGTEYYYYYYYMDVW

SEQ ID NO: 46314 - protein, 17 aa, Homo sapiens
CATDSIGFSGFYSNDYW

SEQ ID NO: 46315 - protein, 17 aa, Homo sapiens
CAKDIAVAGPAYYMDVW

SEQ ID NO: 46316 - protein, 20 aa, Homo sapiens
CVTGPSYESSGDYYPYFDYW

SEQ ID NO: 46317 - protein, 19 aa, Homo sapiens
CSYGGNSGLYYYYYYMDVW

SEQ ID NO: 46318 - protein, 12 aa, Homo sapiens
CQKYHNAPALSF

SEQ ID NO: 46319 - protein, 24 aa, Homo sapiens
CASGRARVQTYYYESSGYGSFDSW

SEQ ID NO: 46320 - protein, 18 aa, Homo sapiens
CSRGITVTGWWSYYFDYW

SEQ ID NO: 46321 - protein, 23 aa, Homo sapiens
CARDSPRCSGGTCYLGDYYFDYW

SEQ ID NO: 46322 - protein, 15 aa, Homo sapiens
CARMDSYAYSNFDSW

SEQ ID NO: 46323 - protein, 16 aa, Homo sapiens
CVHEAEFSGHYYMDVW

SEQ ID NO: 46324 - protein, 17 aa, Homo sapiens
CVRDRGSRVWLEAFDVW

SEQ ID NO: 46325 - protein, 16 aa, Homo sapiens
CARDRGGNYPNYMDVW

SEQ ID NO: 46326 - protein, 16 aa, Homo sapiens
CSSYAGGNNFRASYVF

SEQ ID NO: 46327 - protein, 18 aa, Homo sapiens
CVKDIRIGGYTYAYFDYW

SEQ ID NO: 46328 - protein, 20 aa, Homo sapiens
CAKDRVRWFGDSVSMGNDYW

SEQ ID NO: 46329 - protein, 20 aa, Homo sapiens
CTTDLVRLPYSNSVSRYDYW

SEQ ID NO: 46330 - protein, 16 aa, Homo sapiens
CARWRYDYGDYRPDYW

SEQ ID NO: 46331 - protein, 25 aa, Homo sapiens
CARGGDCRDHTCAIDFYYYYYMDVW

SEQ ID NO: 46332 - protein, 20 aa, Homo sapiens
CARCPKVPIVGAQPTAFDIW

SEQ ID NO: 46333 - protein, 15 aa, Homo sapiens
CAKDQMSTMSYFDFW

SEQ ID NO: 46334 - protein, 29 aa, Homo sapiens
CAKVGVLRYFDWLSQIPGILQVDDAFDIW

SEQ ID NO: 46335 - protein, 14 aa, Homo sapiens
CMQGIHLPQDTWTF

SEQ ID NO: 46336 - protein, 17 aa, Homo sapiens
CAKVGSVWGSFRCPDYW

SEQ ID NO: 46337 - protein, 19 aa, Homo sapiens
CARHRWTVEDRPLVPYDYW

SEQ ID NO: 46338 - protein, 21 aa, Homo sapiens
CARGAPSYASRRRYRYYFDYW

SEQ ID NO: 46339 - protein, 17 aa, Homo sapiens
CARDPERHLGEFSTDYW

SEQ ID NO: 46340 - protein, 18 aa, Homo sapiens
CARGGRGSGYHLVPFDYW

SEQ ID NO: 46341 - protein, 18 aa, Homo sapiens
CARHSGGYGGSSAFIDYW

SEQ ID NO: 46342 - protein, 16 aa, Homo sapiens
CARQGRLGELSSFDYW

SEQ ID NO: 46343 - protein, 11 aa, Homo sapiens
CVKIIQLIDYW

SEQ ID NO: 46344 - protein, 17 aa, Homo sapiens
CARDGGPGYPLRAFDVW

SEQ ID NO: 46345 - protein, 17 aa, Homo sapiens
CARNSGSYDGVWRFDYW

SEQ ID NO: 46346 - protein, 18 aa, Homo sapiens
CALIRQAYDNGITPFDYW

SEQ ID NO: 46347 - protein, 22 aa, Homo sapiens
CTRGNRHYNFWSVAPLYYMDVW

SEQ ID NO: 46348 - protein, 19 aa, Homo sapiens
CARGGGDSRGSFINWFDTW

SEQ ID NO: 46349 - protein, 21 aa, Homo sapiens
CARGNSGYDWRYYDYYYMDVW

SEQ ID NO: 46350 - protein, 22 aa, Homo sapiens
CAKGPYYYDESGYNQAEYFQHW

SEQ ID NO: 46351 - protein, 20 aa, Homo sapiens
CAKKAGSRCSAGTCFSFDNW

SEQ ID NO: 46352 - protein, 19 aa, Homo sapiens
CARVGFDYYDSTIYYFDYW

SEQ ID NO: 46353 - protein, 18 aa, Homo sapiens
CARNNFDAGRYYRSLDYW

SEQ ID NO: 46354 - protein, 14 aa, Homo sapiens
CARDLRLRRVPDYW

SEQ ID NO: 46355 - protein, 20 aa, Homo sapiens
CARHPLWRFGEPLSYYFDYW

SEQ ID NO: 46356 - protein, 19 aa, Homo sapiens
CAKDGCSSKSCYPRLFDHW

SEQ ID NO: 46357 - protein, 15 aa, Homo sapiens
CARDQSTNPRVFDLW

SEQ ID NO: 46358 - protein, 19 aa, Homo sapiens
CARETVPSGSRYYSEIDYW

SEQ ID NO: 46359 - protein, 18 aa, Homo sapiens
CATIAPCRGGTCYIFEYW

SEQ ID NO: 46360 - protein, 20 aa, Homo sapiens
CARGGARYFDWYAPPLLDYW

SEQ ID NO: 46361 - protein, 18 aa, Homo sapiens
CARGTREVRWLAPPFDLW

SEQ ID NO: 46362 - protein, 18 aa, Homo sapiens
CARSVFWSGAKNDAFDIW

SEQ ID NO: 46363 - protein, 17 aa, Homo sapiens
CVKDRGYYGIYDPFDMW

SEQ ID NO: 46364 - protein, 18 aa, Homo sapiens
CARGTHFDSSGRNAFDIW

SEQ ID NO: 46365 - protein, 16 aa, Homo sapiens
CAKGLLVSTLSKFDFW

SEQ ID NO: 46366 - protein, 27 aa, Homo sapiens
CARVSSPISPNYDILTGYYYYYYMDVW

SEQ ID NO: 46367 - protein, 15 aa, Homo sapiens
CAFGSGYRSDAFDIW

SEQ ID NO: 46368 - protein, 16 aa, Homo sapiens
CARPLLFFDSYFFGYW

SEQ ID NO: 46369 - protein, 22 aa, Homo sapiens
CVSPLFTYSGHDWTYLDAFDFW

SEQ ID NO: 46370 - protein, 19 aa, Homo sapiens
CAGLKYGGYSYGDGWFDPW

SEQ ID NO: 46371 - protein, 17 aa, Homo sapiens
CAKSGSSGSYAESFDLW

SEQ ID NO: 46372 - protein, 19 aa, Homo sapiens
CARCFRFLTGPRQCYFDSW

SEQ ID NO: 46373 - protein, 14 aa, Homo sapiens
CARLWRDNSGRDYW

SEQ ID NO: 46374 - protein, 20 aa, Homo sapiens
CARGQYIVGGTKGHGAFDIW

SEQ ID NO: 46375 - protein, 14 aa, Homo sapiens
CASATVTTDAFDIW

SEQ ID NO: 46376 - protein, 17 aa, Homo sapiens
CVRDSYGDNGEGAFDVW

SEQ ID NO: 46377 - protein, 13 aa, Homo sapiens
CARERVDGSLDYW

SEQ ID NO: 46378 - protein, 16 aa, Homo sapiens
CAHRPVYTYGYSFDYW

SEQ ID NO: 46379 - protein, 19 aa, Homo sapiens
CATRGHDILTGYHYYFDHW

SEQ ID NO: 46380 - protein, 19 aa, Homo sapiens
CAKDQDRASGSDWREFDYW

SEQ ID NO: 46381 - protein, 13 aa, Homo sapiens
CAKIAVNEPSDYW

SEQ ID NO: 46382 - protein, 24 aa, Homo sapiens
CARDAAITIFGVAPPGYHYYMDVW

SEQ ID NO: 46383 - protein, 11 aa, Homo sapiens
CATRMTTSDYW

SEQ ID NO: 46384 - protein, 13 aa, Homo sapiens
CVHRNNGRWFDYW

SEQ ID NO: 46385 - protein, 14 aa, Homo sapiens
CMQSGSFIEEFDYW

SEQ ID NO: 46386 - protein, 16 aa, Homo sapiens
CARLPGRASYDLFDQW

SEQ ID NO: 46387 - protein, 17 aa, Homo sapiens
CARRIGVVVGAGYMDVW

SEQ ID NO: 46388 - protein, 19 aa, Homo sapiens
CAKDGQYQLVLGHGWFDPW

SEQ ID NO: 46389 - protein, 12 aa, Homo sapiens
CKQSRGGEFDYW

SEQ ID NO: 46390 - protein, 21 aa, Homo sapiens
CARVGRGDIGVVVPATSFDFW

SEQ ID NO: 46391 - protein, 15 aa, Homo sapiens
CTRDGSANESRFDYW

SEQ ID NO: 46392 - protein, 18 aa, Homo sapiens
CARAPGFGDFLSPDFDSW

SEQ ID NO: 46393 - protein, 18 aa, Homo sapiens
CVKAQDMDTAMVAAFEIW

SEQ ID NO: 46394 - protein, 15 aa, Homo sapiens
CARDFHVGATRFDSW

SEQ ID NO: 46395 - protein, 18 aa, Homo sapiens
CARLPGDTSSIGLSFDLW

SEQ ID NO: 46396 - protein, 17 aa, Homo sapiens
CARRMPGYSSGWTFDYW

SEQ ID NO: 46397 - protein, 21 aa, Homo sapiens
CARGEIDREVAYYYYFYMDVW

SEQ ID NO: 46398 - protein, 15 aa, Homo sapiens
CAREYRSSYLVLDYW

SEQ ID NO: 46399 - protein, 21 aa, Homo sapiens
CAREANYDNLSTYRPDAFDIW

SEQ ID NO: 46400 - protein, 16 aa, Homo sapiens
CARDIEQQQLGWFDPW

SEQ ID NO: 46401 - protein, 17 aa, Homo sapiens
CHYDGTPPGIHLYVDVW

SEQ ID NO: 46402 - protein, 20 aa, Homo sapiens
CASSKRGKGLPLADDAFDIW

SEQ ID NO: 46403 - protein, 12 aa, Homo sapiens
CARVSINWPDFW

SEQ ID NO: 46404 - protein, 16 aa, Homo sapiens
CVKDYGSSGQDAFDVW

SEQ ID NO: 46405 - protein, 15 aa, Homo sapiens
CAGGGDYIHSPFDLW

SEQ ID NO: 46406 - protein, 14 aa, Homo sapiens
CATQFSSSSRWDYW

SEQ ID NO: 46407 - protein, 20 aa, Homo sapiens
CARRDYDIATTLISYWFDPW

SEQ ID NO: 46408 - protein, 20 aa, Homo sapiens
CARRPYDFLTGYWDYYFDFW

SEQ ID NO: 46409 - protein, 17 aa, Homo sapiens
CASLDYDVLNYDYMDVW

SEQ ID NO: 46410 - protein, 16 aa, Homo sapiens
CARDSTVTRFGRFDPW

SEQ ID NO: 46411 - protein, 17 aa, Homo sapiens
CAKVAKSTMVRGAFDYW

SEQ ID NO: 46412 - protein, 18 aa, Homo sapiens
CARASKYDILRGYAFDVW

SEQ ID NO: 46413 - protein, 16 aa, Homo sapiens
CARDLSYGAGDYMDVW

SEQ ID NO: 46414 - protein, 16 aa, Homo sapiens
CARDLGSMVGCCFDCW

SEQ ID NO: 46415 - protein, 15 aa, Homo sapiens
CARDTYYTVALFDYW

SEQ ID NO: 46416 - protein, 16 aa, Homo sapiens
CARITSNWFKDAFDAW

SEQ ID NO: 46417 - protein, 19 aa, Homo sapiens
CTRAYCGADCYSLNNFDYW

SEQ ID NO: 46418 - protein, 17 aa, Homo sapiens
CARIASRDSSGWSFDIW

SEQ ID NO: 46419 - protein, 20 aa, Homo sapiens
CARDYYDSNGYYYVLYFDSW

SEQ ID NO: 46420 - protein, 15 aa, Homo sapiens
CASPYYYGSGTFDPW

SEQ ID NO: 46421 - protein, 16 aa, Homo sapiens
CASRSPRRAGNYFDPW

SEQ ID NO: 46422 - protein, 23 aa, Homo sapiens
CMRDRAASFLWPGSWINDAFDIW

SEQ ID NO: 46423 - protein, 12 aa, Homo sapiens
CARYRERVFDFW

SEQ ID NO: 46424 - protein, 19 aa, Homo sapiens
CARERQVAKFGYHYYMDVW

SEQ ID NO: 46425 - protein, 18 aa, Homo sapiens
CARDNGPQYSTSWRWDYW

SEQ ID NO: 46426 - protein, 15 aa, Homo sapiens
CAWSYSSSFHWFDPW

SEQ ID NO: 46427 - protein, 26 aa, Homo sapiens
CARGVLNRRLYDILTGLSYYYYMDVW

SEQ ID NO: 46428 - protein, 17 aa, Homo sapiens
CARHSIAYDITDAFDVW

SEQ ID NO: 46429 - protein, 19 aa, Homo sapiens
CAKRQGGQLSTPANYFDYW

SEQ ID NO: 46430 - protein, 21 aa, Homo sapiens
CAREGYAIMVENVMRGAFDIW

SEQ ID NO: 46431 - protein, 15 aa, Homo sapiens
CAKRRYSSSSYFEYW

SEQ ID NO: 46432 - protein, 18 aa, Homo sapiens
CSRGLHGSGTYDGYVQYW

SEQ ID NO: 46433 - protein, 27 aa, Homo sapiens
CARVAPALLTPDAGPDPGPDFHYMDVW

SEQ ID NO: 46434 - protein, 24 aa, Homo sapiens
CARDKRAGVGAMWGVPPLYSFDYW

SEQ ID NO: 46435 - protein, 16 aa, Homo sapiens
CARSLAVAGTGWFDPW

SEQ ID NO: 46436 - protein, 18 aa, Homo sapiens
CAKDPNLDLGSGTYFEYW

SEQ ID NO: 46437 - protein, 19 aa, Homo sapiens
CAKVKQQPGFHYYYYMDVW

SEQ ID NO: 46438 - protein, 12 aa, Homo sapiens
CVGLEPYTFDYW

SEQ ID NO: 46439 - protein, 16 aa, Homo sapiens
CVRVPGVGAIRPIDYW

SEQ ID NO: 46440 - protein, 20 aa, Homo sapiens
CARDGGSFSSSVGSPWFDPW

SEQ ID NO: 46441 - protein, 20 aa, Homo sapiens
CARGGGYPGISIDARGFDYW

SEQ ID NO: 46442 - protein, 20 aa, Homo sapiens
CAKKAGWRCFVGTCYSFDDW

SEQ ID NO: 46443 - protein, 23 aa, Homo sapiens
CARTYHDSGTAYPYYYFYYMDVW

SEQ ID NO: 46444 - protein, 17 aa, Homo sapiens
CARAMSGYRRYYYMDVW

SEQ ID NO: 46445 - protein, 17 aa, Homo sapiens
CASGGLLWFGESPFDYW

SEQ ID NO: 46446 - protein, 20 aa, Homo sapiens
CVKEGYLDSSGYYGGYFDDW

SEQ ID NO: 46447 - protein, 13 aa, Homo sapiens
CARRRSSTWFDLW

SEQ ID NO: 46448 - protein, 21 aa, Homo sapiens
CGRDSFLNGYSSTWYGPSDYW

SEQ ID NO: 46449 - protein, 16 aa, Homo sapiens
CETTVEKEGYDGVDIW

SEQ ID NO: 46450 - protein, 17 aa, Homo sapiens
CAKRTIAATREYYIDYW

SEQ ID NO: 46451 - protein, 19 aa, Homo sapiens
CARLGSNGWFDAQAAFDIW

SEQ ID NO: 46452 - protein, 13 aa, Homo sapiens
CATPKVTSAFDYW

SEQ ID NO: 46453 - protein, 23 aa, Homo sapiens
CARDRPRFYDNTSGHYLGYLDYW

SEQ ID NO: 46454 - protein, 15 aa, Homo sapiens
CARHIILDMATFDYW

SEQ ID NO: 46455 - protein, 19 aa, Homo sapiens
CARGGVDGGYDQWLGFDFW

SEQ ID NO: 46456 - protein, 19 aa, Homo sapiens
CARGVLLWFGASLDAFDIW

SEQ ID NO: 46457 - protein, 16 aa, Homo sapiens
CANMLRGVIASPFDIW

SEQ ID NO: 46458 - protein, 25 aa, Homo sapiens
CARHLPPYPHYSDRGRYVGNYFDYW

SEQ ID NO: 46459 - protein, 21 aa, Homo sapiens
CARIKRRPLVATIAPDALDIW

SEQ ID NO: 46460 - protein, 17 aa, Homo sapiens
CARDSSRSPGSYIFDYW

SEQ ID NO: 46461 - protein, 22 aa, Homo sapiens
CAREINSISLEVAASFYFFDYW

SEQ ID NO: 46462 - protein, 13 aa, Homo sapiens
CQAWDTSHALLMF

SEQ ID NO: 46463 - protein, 19 aa, Homo sapiens
CARDLGYETSSHYNLLDYW

SEQ ID NO: 46464 - protein, 17 aa, Homo sapiens
CARLAPQFLGGYYFDSW

SEQ ID NO: 46465 - protein, 19 aa, Homo sapiens
CAKDDSLIAGTTLRYFDCW

SEQ ID NO: 46466 - protein, 13 aa, Homo sapiens
CARDDDTTGFDIW

SEQ ID NO: 46467 - protein, 15 aa, Homo sapiens
CARDYGSNYNCFDPW

SEQ ID NO: 46468 - protein, 21 aa, Homo sapiens
CSKGSALGYCTGTNCYHFDSW

SEQ ID NO: 46469 - protein, 18 aa, Homo sapiens
CARDRPVLSGSNWIFDYW

SEQ ID NO: 46470 - protein, 27 aa, Homo sapiens
CARHPRPSRLAGAGDGLPDPLYFFDSW

SEQ ID NO: 46471 - protein, 22 aa, Homo sapiens
CARAPTLAARRHYYYYYYMDVW

SEQ ID NO: 46472 - protein, 16 aa, Homo sapiens
CARHSLGNSGWYIDYW

SEQ ID NO: 46473 - protein, 20 aa, Homo sapiens
CAKEGDYDSAGYSFDAFDIW

SEQ ID NO: 46474 - protein, 15 aa, Homo sapiens
CAKHYGDFVGPFDYW

SEQ ID NO: 46475 - protein, 17 aa, Homo sapiens
CGRQPRISVLRGGGDYW

SEQ ID NO: 46476 - protein, 18 aa, Homo sapiens
CARGEDCGGNCHSKFDLW

SEQ ID NO: 46477 - protein, 18 aa, Homo sapiens
CQQYGHPPLTYGSSPLTF

SEQ ID NO: 46478 - protein, 19 aa, Homo sapiens
CAKDHQMYRIAAAAHFDYW

SEQ ID NO: 46479 - protein, 19 aa, Homo sapiens
CSRDQGYYSDSSGHYFRDW

SEQ ID NO: 46480 - protein, 16 aa, Homo sapiens
CARLNVWGSYRFFDVW

SEQ ID NO: 46481 - protein, 15 aa, Homo sapiens
CARSHSPVHFYFGYW

SEQ ID NO: 46482 - protein, 27 aa, Homo sapiens
CARGLSLRLRDGYNEEDYHYYYYMDVW

SEQ ID NO: 46483 - protein, 23 aa, Homo sapiens
CARHWAERRYFDLPLYYYYMDVW

SEQ ID NO: 46484 - protein, 19 aa, Homo sapiens
CARDLRPYNWNDLGAFDIW

SEQ ID NO: 46485 - protein, 19 aa, Homo sapiens
CTVSPRCFGGNCYHPFDFW

SEQ ID NO: 46486 - protein, 19 aa, Homo sapiens
CARESDYGDYRRVRDFDYW

SEQ ID NO: 46487 - protein, 16 aa, Homo sapiens
CARLSTSFTGSYSDYW

SEQ ID NO: 46488 - protein, 21 aa, Homo sapiens
CARDGRRYFDWLLWSLLGDYW

SEQ ID NO: 46489 - protein, 18 aa, Homo sapiens
CARASARWELLGGRFDPW

SEQ ID NO: 46490 - protein, 25 aa, Homo sapiens
CARGGVSYDGTTHDHPQSLAVLDYW

SEQ ID NO: 46491 - protein, 19 aa, Homo sapiens
CAKLEGGDTYGTRPGFDSW

SEQ ID NO: 46492 - protein, 17 aa, Homo sapiens
CATNAPGAMTGYRYDYW

SEQ ID NO: 46493 - protein, 19 aa, Homo sapiens
CAKPEGYSDNWYGNWLDPW

SEQ ID NO: 46494 - protein, 18 aa, Homo sapiens
CAYAEGAIYSSGWYFDYW

SEQ ID NO: 46495 - protein, 25 aa, Homo sapiens
CAKDTYSETYDYVWGSYRYVYFDSW

SEQ ID NO: 46496 - protein, 16 aa, Homo sapiens
CARDNTRGSSSCFYYW

SEQ ID NO: 46497 - protein, 19 aa, Homo sapiens
CARVAETGFSYGFRWFDPW

SEQ ID NO: 46498 - protein, 17 aa, Homo sapiens
CVKGLNDYGDNNYFDTW

SEQ ID NO: 46499 - protein, 19 aa, Homo sapiens
CAKDLEDHSRYYYAFFDSW

SEQ ID NO: 46500 - protein, 17 aa, Homo sapiens
CAKGKYFDWLWGIFEYW

SEQ ID NO: 46501 - protein, 19 aa, Homo sapiens
CARHVVITVVTPRAPFDYW

SEQ ID NO: 46502 - protein, 21 aa, Homo sapiens
CVRDRCSSASCYKYFYYMDVW

SEQ ID NO: 46503 - protein, 19 aa, Homo sapiens
CARGPTTYSSFRKFYMDVW

SEQ ID NO: 46504 - protein, 21 aa, Homo sapiens
CAKDKGFFLGYSYDASYFDYW

SEQ ID NO: 46505 - protein, 18 aa, Homo sapiens
CAKASFRWKASGLLFDSW

SEQ ID NO: 46506 - protein, 15 aa, Homo sapiens
CANGNPDTAYSFDTW

SEQ ID NO: 46507 - protein, 15 aa, Homo sapiens
CVRDRVAADYYMDVW

SEQ ID NO: 46508 - protein, 18 aa, Homo sapiens
CASDIFWSGYYIGGGDYW

SEQ ID NO: 46509 - protein, 15 aa, Homo sapiens
CVRKDYGSGRYFDYW

SEQ ID NO: 46510 - protein, 17 aa, Homo sapiens
CTRDYYYDSTTDAFDIW

SEQ ID NO: 46511 - protein, 17 aa, Homo sapiens
CAGEGGYNTGVAWFDPW

SEQ ID NO: 46512 - protein, 23 aa, Homo sapiens
CARDSPLPLFRGLTYFYYYMDVW

SEQ ID NO: 46513 - protein, 17 aa, Homo sapiens
CVRQIPTAGNPRWFDPW

SEQ ID NO: 46514 - protein, 18 aa, Homo sapiens
CARDALAVAQAGSWFDPW

SEQ ID NO: 46515 - protein, 22 aa, Homo sapiens
CGRDPVTATTGSSYYYYYMDVW

SEQ ID NO: 46516 - protein, 21 aa, Homo sapiens
CARVPEITVIGGGMVGYFDHW

SEQ ID NO: 46517 - protein, 22 aa, Homo sapiens
CARGSDSTWLYTSDYYYYVDVW

SEQ ID NO: 46518 - protein, 15 aa, Homo sapiens
CVRDEHFQGSYRDYW

SEQ ID NO: 46519 - protein, 23 aa, Homo sapiens
CARDLEEGAYYYDSSGYYGMDYW

SEQ ID NO: 46520 - protein, 15 aa, Homo sapiens
CARGFGRFGEVADYW

SEQ ID NO: 46521 - protein, 17 aa, Homo sapiens
CGRVDHYGGNSPYFDYW

SEQ ID NO: 46522 - protein, 18 aa, Homo sapiens
CASPYYSETSDYSKRDYW

SEQ ID NO: 46523 - protein, 13 aa, Homo sapiens
CQSAESSGADFLF

SEQ ID NO: 46524 - protein, 15 aa, Homo sapiens
CATEKYSGTYYWYYW

SEQ ID NO: 46525 - protein, 15 aa, Homo sapiens
CARDGRSGSYRGDYW

SEQ ID NO: 46526 - protein, 26 aa, Homo sapiens
CAHSLLDILPGYRPISWRPEPDFDYW

SEQ ID NO: 46527 - protein, 26 aa, Homo sapiens
CASPERYFYADSGSHSSYYYYYMGVW

SEQ ID NO: 46528 - protein, 14 aa, Homo sapiens
CARDGLEKVACDYW

SEQ ID NO: 46529 - protein, 16 aa, Homo sapiens
CARDPTVTKSPSFDSW

SEQ ID NO: 46530 - protein, 14 aa, Homo sapiens
CAKVVSSKNFFDSW

SEQ ID NO: 46531 - protein, 23 aa, Homo sapiens
CARGTGVQTIRYGSFYYFYMDVW

SEQ ID NO: 46532 - protein, 17 aa, Homo sapiens
CARDVDGDPRGNAFDIW

SEQ ID NO: 46533 - protein, 19 aa, Homo sapiens
CAKDSFLQSSLVMTPGDYW

SEQ ID NO: 46534 - protein, 24 aa, Homo sapiens
CARDAKYYWREGRGFQNQDIFDFW

SEQ ID NO: 46535 - protein, 17 aa, Homo sapiens
CAIGVYDGSPTGALDVW

SEQ ID NO: 46536 - protein, 19 aa, Homo sapiens
CAKDVGTSQYDSSGYFNHW

SEQ ID NO: 46537 - protein, 15 aa, Homo sapiens
CARGRMLSRSYLDFW

SEQ ID NO: 46538 - protein, 15 aa, Homo sapiens
CARAQTSGHGPQDYW

SEQ ID NO: 46539 - protein, 16 aa, Homo sapiens
CAKGRTFSIAASLDYW

SEQ ID NO: 46540 - protein, 15 aa, Homo sapiens
CTSPAGTTPWWFDYW

SEQ ID NO: 46541 - protein, 22 aa, Homo sapiens
CARCGVETQLLPPQTGRYFDYW

SEQ ID NO: 46542 - protein, 16 aa, Homo sapiens
CARRGDVSGTYPLDYW

SEQ ID NO: 46543 - protein, 23 aa, Homo sapiens
CAKDATAPGITIFRVWLGYLDNW

SEQ ID NO: 46544 - protein, 24 aa, Homo sapiens
CAKTADGSGSYYWWVGESGHFDYW

SEQ ID NO: 46545 - protein, 17 aa, Homo sapiens
CARDGSYSGSSYAVDYW

SEQ ID NO: 46546 - protein, 15 aa, Homo sapiens
CARIRASYYGAFDVW

SEQ ID NO: 46547 - protein, 20 aa, Homo sapiens
CAKTWRRDCSSTSCYWFDYW

SEQ ID NO: 46548 - protein, 21 aa, Homo sapiens
CARATNLAIDYYYYYYYMDVW

SEQ ID NO: 46549 - protein, 14 aa, Homo sapiens
CGAWDSRLSAEVIF

SEQ ID NO: 46550 - protein, 18 aa, Homo sapiens
CVRSCSLAGSCYGWFDSW

SEQ ID NO: 46551 - protein, 21 aa, Homo sapiens
CARQDYNTLTTGYSPTVFDYW

SEQ ID NO: 46552 - protein, 16 aa, Homo sapiens
CAKAEGVPAAGIFDLW

SEQ ID NO: 46553 - protein, 23 aa, Homo sapiens
CGKFPRTNYYDHSGYYYQAFDYW

SEQ ID NO: 46554 - protein, 13 aa, Homo sapiens
CQSHDSSNFHVVF

SEQ ID NO: 46555 - protein, 18 aa, Homo sapiens
CVRVPFDNSGYPSAFDYW

SEQ ID NO: 46556 - protein, 17 aa, Homo sapiens
CAKDRDIWFGDLAFDNW

SEQ ID NO: 46557 - protein, 20 aa, Homo sapiens
CAHRKDDSSGYYWGCAFDIW

SEQ ID NO: 46558 - protein, 20 aa, Homo sapiens
CARGFEYYYGSGSYPPFDYW

SEQ ID NO: 46559 - protein, 14 aa, Homo sapiens
CAKIGHRGWHFDSW

SEQ ID NO: 46560 - protein, 17 aa, Homo sapiens
CAKDRSGFDYVYDFDCW

SEQ ID NO: 46561 - protein, 14 aa, Homo sapiens
CVRDRGYPDAFDLW

SEQ ID NO: 46562 - protein, 20 aa, Homo sapiens
CAKEGRDGYFYYYYYYMDVW

SEQ ID NO: 46563 - protein, 18 aa, Homo sapiens
CARLAYSYGYDYSYMDVW

SEQ ID NO: 46564 - protein, 16 aa, Homo sapiens
CARDQENYGGDYFHYW

SEQ ID NO: 46565 - protein, 21 aa, Homo sapiens
CAGGCSAGICDYYYYYYMGVW

SEQ ID NO: 46566 - protein, 25 aa, Homo sapiens
CAREKINYYGSGSGSYYIPFYFDFW

SEQ ID NO: 46567 - protein, 20 aa, Homo sapiens
CARSPNDLMIRGVDDAFDFW

SEQ ID NO: 46568 - protein, 16 aa, Homo sapiens
CATRDDGNYYAPLDYW

SEQ ID NO: 46569 - protein, 19 aa, Homo sapiens
CAKDSNYDILNGYPPFDYW

SEQ ID NO: 46570 - protein, 16 aa, Homo sapiens
CAKQEGIVVVDTFDIW

SEQ ID NO: 46571 - protein, 10 aa, Homo sapiens
CTGPTAFDIW

SEQ ID NO: 46572 - protein, 13 aa, Homo sapiens
CARKDGYNFFDYW

SEQ ID NO: 46573 - protein, 15 aa, Homo sapiens
CARQRTRYYYYFDFW

SEQ ID NO: 46574 - protein, 18 aa, Homo sapiens
CAREAYDGTGSAPFFDYW

SEQ ID NO: 46575 - protein, 17 aa, Homo sapiens
CAKPYYDTTSFYLFDSW

SEQ ID NO: 46576 - protein, 17 aa, Homo sapiens
CARLEYPKYHTQPYDYW

SEQ ID NO: 46577 - protein, 13 aa, Homo sapiens
CAKVAGYSYFEYW

SEQ ID NO: 46578 - protein, 18 aa, Homo sapiens
CARDLNPVFDPTNGFDIW

SEQ ID NO: 46579 - protein, 17 aa, Homo sapiens
CASDSFRGYSYGPFDYW

SEQ ID NO: 46580 - protein, 18 aa, Homo sapiens
CARDLCSSTSCYGWGDYW

SEQ ID NO: 46581 - protein, 21 aa, Homo sapiens
CARDPADATKGYYYYYYMDVW

SEQ ID NO: 46582 - protein, 20 aa, Homo sapiens
CAKSTRYYYDSSGYYPPDYW

SEQ ID NO: 46583 - protein, 14 aa, Homo sapiens
CASNIVGRHWFDPW

SEQ ID NO: 46584 - protein, 20 aa, Homo sapiens
CARGAVKFSDWDGEYYLDYW

SEQ ID NO: 46585 - protein, 13 aa, Homo sapiens
CAIYAAGYSLDYW

SEQ ID NO: 46586 - protein, 23 aa, Homo sapiens
CARDSDIALVPAAIGALNWLDPW

SEQ ID NO: 46587 - protein, 21 aa, Homo sapiens
CAKWVRDIVATDYYYYYMDVW

SEQ ID NO: 46588 - protein, 18 aa, Homo sapiens
CAREVPHGVGSFEVFDMW

SEQ ID NO: 46589 - protein, 17 aa, Homo sapiens
CARASGSYYSGGYFDYW

SEQ ID NO: 46590 - protein, 19 aa, Homo sapiens
CARVRTSGWYSGSYYFDYW

SEQ ID NO: 46591 - protein, 21 aa, Homo sapiens
CARDDAPGITAPGEGNWFDPW

SEQ ID NO: 46592 - protein, 21 aa, Homo sapiens
CAKDIVVGYDILTEYPHFDSW

SEQ ID NO: 46593 - protein, 20 aa, Homo sapiens
CARDLRYSSTWDYYFYMDVW

SEQ ID NO: 46594 - protein, 17 aa, Homo sapiens
CAKDLAQYSSWYRFDYW

SEQ ID NO: 46595 - protein, 17 aa, Homo sapiens
CARGGYNLLSGWPFDYW

SEQ ID NO: 46596 - protein, 17 aa, Homo sapiens
CARVTTLTTVLYYFDFW

SEQ ID NO: 46597 - protein, 20 aa, Homo sapiens
CATVKIVDPRGPGTRPWDYW

SEQ ID NO: 46598 - protein, 18 aa, Homo sapiens
CARSSNLHRYYYYYMDVW

SEQ ID NO: 46599 - protein, 15 aa, Homo sapiens
CARGQYTYGSDFDLW

SEQ ID NO: 46600 - protein, 23 aa, Homo sapiens
CAKMDASYDPGGPTLTVSYFALW

SEQ ID NO: 46601 - protein, 14 aa, Homo sapiens
CSSRDSSGNLLRLF

SEQ ID NO: 46602 - protein, 17 aa, Homo sapiens
CTTVRVEGLYYYYMDVW

SEQ ID NO: 46603 - protein, 18 aa, Homo sapiens
CARDSAKGLLLVHYFDSW

SEQ ID NO: 46604 - protein, 18 aa, Homo sapiens
CATRAHGADVLTGPHDYW

SEQ ID NO: 46605 - protein, 23 aa, Homo sapiens
CARDLYYYDGRGSYSGASGFDYW

SEQ ID NO: 46606 - protein, 15 aa, Homo sapiens
CASASNWGEWYFDLW

SEQ ID NO: 46607 - protein, 23 aa, Homo sapiens
CARHDCSSTSCYIGPTDDAFDVW

SEQ ID NO: 46608 - protein, 17 aa, Homo sapiens
CTTDLLFGESTPAFDYW

SEQ ID NO: 46609 - protein, 21 aa, Homo sapiens
CATYYYVSSGHFYVDHAFGYW

SEQ ID NO: 46610 - protein, 20 aa, Homo sapiens
CVRTPYGSGSYQASRGFDLW

SEQ ID NO: 46611 - protein, 18 aa, Homo sapiens
CVRDLGGGTYRFSWTDYW

SEQ ID NO: 46612 - protein, 22 aa, Homo sapiens
CARDRKGYCSGGSCYDDAFDIW

SEQ ID NO: 46613 - protein, 16 aa, Homo sapiens
CGRPGDYGDYGLHDYW

SEQ ID NO: 46614 - protein, 15 aa, Homo sapiens
CQQYGASPPSPPYSF

SEQ ID NO: 46615 - protein, 16 aa, Homo sapiens
CAKDMRSNVLRYFDYW

SEQ ID NO: 46616 - protein, 19 aa, Homo sapiens
CAKDGEGDGYLFHGYFDLW

SEQ ID NO: 46617 - protein, 23 aa, Homo sapiens
CATIRMIGSITMVRGVIGSFDYW

SEQ ID NO: 46618 - protein, 17 aa, Homo sapiens
CARAGYDSLWSGYFAYW

SEQ ID NO: 46619 - protein, 19 aa, Homo sapiens
CVRNIEGGALLLVSYFQYW

SEQ ID NO: 46620 - protein, 19 aa, Homo sapiens
CARGLDVEWPIDPNWFDPW

SEQ ID NO: 46621 - protein, 13 aa, Homo sapiens
CQHYNSHSPMYIF

SEQ ID NO: 46622 - protein, 15 aa, Homo sapiens
CARGEWAIVDACDVW

SEQ ID NO: 46623 - protein, 22 aa, Homo sapiens
CARGRGSYGSKRKYYYYYMDVW

SEQ ID NO: 46624 - protein, 19 aa, Homo sapiens
CARWRGIYYYDSSAYHDYW

SEQ ID NO: 46625 - protein, 21 aa, Homo sapiens
CARDGDDYSNYGWAAYYMDVW

SEQ ID NO: 46626 - protein, 16 aa, Homo sapiens
CARGFSSSLYNWLDAW

SEQ ID NO: 46627 - protein, 15 aa, Homo sapiens
CATGDVEGATAFDYW

SEQ ID NO: 46628 - protein, 18 aa, Homo sapiens
CAHRADYYGSGAMPWDYW

SEQ ID NO: 46629 - protein, 18 aa, Homo sapiens
CAKDAIVSYREFYYFDYW

SEQ ID NO: 46630 - protein, 20 aa, Homo sapiens
CARGGHFSGWYGTKYYFDYW

SEQ ID NO: 46631 - protein, 21 aa, Homo sapiens
CARPTYYHDSSGSVAEYFQQW

SEQ ID NO: 46632 - protein, 16 aa, Homo sapiens
CTRGGLQLSYWYFDLW

SEQ ID NO: 46633 - protein, 23 aa, Homo sapiens
CAKDNPSIYDSSGYYQPGAFDIW

SEQ ID NO: 46634 - protein, 17 aa, Homo sapiens
CTREVEWWLGGRWFDPW

SEQ ID NO: 46635 - protein, 23 aa, Homo sapiens
CARSKGSYSSNGFDGYVGAFDSW

SEQ ID NO: 46636 - protein, 16 aa, Homo sapiens
CARRQRNWNGFYFDSW

SEQ ID NO: 46637 - protein, 22 aa, Homo sapiens
CTIYRSLPYSDTVGFQFYFAQW

SEQ ID NO: 46638 - protein, 20 aa, Homo sapiens
CAREVYRNSDTAMVTLFDYW

SEQ ID NO: 46639 - protein, 15 aa, Homo sapiens
CAKDIEASTNSFDIW

SEQ ID NO: 46640 - protein, 19 aa, Homo sapiens
CASLGDVTTVTTVFAFDNW

SEQ ID NO: 46641 - protein, 22 aa, Homo sapiens
CVRGRYCHSSNCYFGENWFDSW

SEQ ID NO: 46642 - protein, 18 aa, Homo sapiens
CAGGTGYVGPDYYYMDVW

SEQ ID NO: 46643 - protein, 18 aa, Homo sapiens
CARAAYINYFVYYYMDVW

SEQ ID NO: 46644 - protein, 19 aa, Homo sapiens
CARVMYYSDSRGYYRIDYW

SEQ ID NO: 46645 - protein, 18 aa, Homo sapiens
CAKDRGRYFDWNDAFDIW

SEQ ID NO: 46646 - protein, 18 aa, Homo sapiens
CAKASYDSSGYYSFFDYW

SEQ ID NO: 46647 - protein, 23 aa, Homo sapiens
CASQGGDYDISTGYSVRHYFDSW

SEQ ID NO: 46648 - protein, 19 aa, Homo sapiens
CARGFPLVVPRAIYAFDIW

SEQ ID NO: 46649 - protein, 18 aa, Homo sapiens
CAKESGVGPPYYYYMDVW

SEQ ID NO: 46650 - protein, 22 aa, Homo sapiens
CARDGGYSYGPRRRYYYYMDVW

SEQ ID NO: 46651 - protein, 17 aa, Homo sapiens
CARDRRWGSNRDGFDIW

SEQ ID NO: 46652 - protein, 23 aa, Homo sapiens
CARGLNPYYSASSGYYFGYFDPW

SEQ ID NO: 46653 - protein, 10 aa, Homo sapiens
CAVGASFDLW

SEQ ID NO: 46654 - protein, 21 aa, Homo sapiens
CAKAADAVLVPAVTPDWFDPW

SEQ ID NO: 46655 - protein, 14 aa, Homo sapiens
CQQYGYSPHGRYTF

SEQ ID NO: 46656 - protein, 15 aa, Homo sapiens
CAAPRSVSLSILDYW

SEQ ID NO: 46657 - protein, 22 aa, Homo sapiens
CATTSPVSGADAFYYYYYMDVW

SEQ ID NO: 46658 - protein, 21 aa, Homo sapiens
CVRDGYGDYRYSDFYYYMDVW

SEQ ID NO: 46659 - protein, 25 aa, Homo sapiens
CAKASLSVVVVAATQSYRRNWFDPW

SEQ ID NO: 46660 - protein, 27 aa, Homo sapiens
CARNSYGRYSESGGSYWFQQITFFDYW

SEQ ID NO: 46661 - protein, 16 aa, Homo sapiens
CAHSPHASVVYYFDYW

SEQ ID NO: 46662 - protein, 17 aa, Homo sapiens
CARQFYYDSSVWTFDFW

SEQ ID NO: 46663 - protein, 19 aa, Homo sapiens
CAKIGGRATSGVARWFDPW

SEQ ID NO: 46664 - protein, 16 aa, Homo sapiens
CASRDVWFGESRNDYW

SEQ ID NO: 46665 - protein, 14 aa, Homo sapiens
CARGQQWLALFDHW

SEQ ID NO: 46666 - protein, 18 aa, Homo sapiens
CAKAHHSIAVGHWYFDLW

SEQ ID NO: 46667 - protein, 16 aa, Homo sapiens
CARGNSGEYGDFFDYW

SEQ ID NO: 46668 - protein, 24 aa, Homo sapiens
CARIDLSNVWGTYNSRVRSAFDMW

SEQ ID NO: 46669 - protein, 19 aa, Homo sapiens
CAREKLATPGTYNNWFDPW

SEQ ID NO: 46670 - protein, 17 aa, Homo sapiens
CAKDSQGMAAASPFDYW

SEQ ID NO: 46671 - protein, 21 aa, Homo sapiens
CARAPRIAGSYYDRSGPFDSW

SEQ ID NO: 46672 - protein, 15 aa, Homo sapiens
CARLRSGYGEAFDYW

SEQ ID NO: 46673 - protein, 19 aa, Homo sapiens
CVIGGRQDYSSTYFYFDAW

SEQ ID NO: 46674 - protein, 22 aa, Homo sapiens
CTHGLHLAYDGGGYYYGDFDNW

SEQ ID NO: 46675 - protein, 15 aa, Homo sapiens
CASRVAAEGAHFDYW

SEQ ID NO: 46676 - protein, 19 aa, Homo sapiens
CARDDGPDASLERGLFDYW

SEQ ID NO: 46677 - protein, 22 aa, Homo sapiens
CARAKDCFSPTCKSPTNWFDPW

SEQ ID NO: 46678 - protein, 16 aa, Homo sapiens
CARVSKGYSDWFFDLW

SEQ ID NO: 46679 - protein, 18 aa, Homo sapiens
CARSGGSSIAVAGCHDYW

SEQ ID NO: 46680 - protein, 19 aa, Homo sapiens
CASPYCSGDNCFDNWFDPW

SEQ ID NO: 46681 - protein, 14 aa, Homo sapiens
CARVQSIEHYFAYW

SEQ ID NO: 46682 - protein, 15 aa, Homo sapiens
CARQRLARTNCFDPW

SEQ ID NO: 46683 - protein, 10 aa, Homo sapiens
CARSLYSDCW

SEQ ID NO: 46684 - protein, 10 aa, Homo sapiens
CQQYGMSLFF

SEQ ID NO: 46685 - protein, 19 aa, Homo sapiens
CARDGENSSGWPGGWFDPW

SEQ ID NO: 46686 - protein, 16 aa, Homo sapiens
CARDPLAVAEAPEDYW

SEQ ID NO: 46687 - protein, 19 aa, Homo sapiens
CARGYYDILTGYYIPPDYW

SEQ ID NO: 46688 - protein, 19 aa, Homo sapiens
CARVAKVAGWREFQGFDPW

SEQ ID NO: 46689 - protein, 19 aa, Homo sapiens
CVRGTTVTGYFHYYYMDVW

SEQ ID NO: 46690 - protein, 14 aa, Homo sapiens
CARMVDLPYYMDVW

SEQ ID NO: 46691 - protein, 14 aa, Homo sapiens
CVREHRLWKYMDVW

SEQ ID NO: 46692 - protein, 14 aa, Homo sapiens
CAIVDCRYEGVDYW

SEQ ID NO: 46693 - protein, 19 aa, Homo sapiens
CARARLRISDWLLSGFDIW

SEQ ID NO: 46694 - protein, 16 aa, Homo sapiens
CARDPHGTGYAALDYW

SEQ ID NO: 46695 - protein, 13 aa, Homo sapiens
CQTWDSTTAAYVF

SEQ ID NO: 46696 - protein, 15 aa, Homo sapiens
CATSGYGTGSFYDYW

SEQ ID NO: 46697 - protein, 20 aa, Homo sapiens
CARDRFPAPGSWYEKVFDSW

SEQ ID NO: 46698 - protein, 21 aa, Homo sapiens
CARGLEYCTNGVCSYNYFDSW

SEQ ID NO: 46699 - protein, 15 aa, Homo sapiens
CAKGKSLYGDYMDVW

SEQ ID NO: 46700 - protein, 17 aa, Homo sapiens
CARDGMTVAGTGWFDTW

SEQ ID NO: 46701 - protein, 26 aa, Homo sapiens
CARSSSYCSRTVCYGEYYYYYYLDVW

SEQ ID NO: 46702 - protein, 20 aa, Homo sapiens
CARLGGFGGLLATTEPFDYW

SEQ ID NO: 46703 - protein, 16 aa, Homo sapiens
CVKGRLGELSARFEYW

SEQ ID NO: 46704 - protein, 24 aa, Homo sapiens
CAHMGLLTYYYDSSNYYPNYFDPW

SEQ ID NO: 46705 - protein, 18 aa, Homo sapiens
CARLPHIRGAYKYYMDVW

SEQ ID NO: 46706 - protein, 19 aa, Homo sapiens
CARDYYDSSAYYYGYFDLW

SEQ ID NO: 46707 - protein, 18 aa, Homo sapiens
CARDGYYDSSASDGFDIW

SEQ ID NO: 46708 - protein, 23 aa, Homo sapiens
CARAATPTYSGSYYEVHEYFQHW

SEQ ID NO: 46709 - protein, 15 aa, Homo sapiens
CAKDPGELGSYFDSW

SEQ ID NO: 46710 - protein, 19 aa, Homo sapiens
CARGSFSSSWFGSEYFRQW

SEQ ID NO: 46711 - protein, 21 aa, Homo sapiens
CARIPHMITFGEVIAWYFDDW

SEQ ID NO: 46712 - protein, 20 aa, Homo sapiens
CARASGYCSPTSCYGHFEYW

SEQ ID NO: 46713 - protein, 17 aa, Homo sapiens
CAREVGYYVTTKWFDPW

SEQ ID NO: 46714 - protein, 11 aa, Homo sapiens
CGSNGDYDAYW

SEQ ID NO: 46715 - protein, 21 aa, Homo sapiens
CASPYFNFLSGYYKGGWFDPW

SEQ ID NO: 46716 - protein, 23 aa, Homo sapiens
CTTRSPGLRSGRTDYFYYYMDVW

SEQ ID NO: 46717 - protein, 24 aa, Homo sapiens
CARHYPLTLYYFGSDNYYNGFDYW

SEQ ID NO: 46718 - protein, 23 aa, Homo sapiens
CARQAARRLTIFWTPAVYYFDYW

SEQ ID NO: 46719 - protein, 16 aa, Homo sapiens
CARYATELERNAFDIW

SEQ ID NO: 46720 - protein, 14 aa, Homo sapiens
CARFRLWGYCFDSW

SEQ ID NO: 46721 - protein, 18 aa, Homo sapiens
CARVYFDSSHYYNGFDYW

SEQ ID NO: 46722 - protein, 17 aa, Homo sapiens
CAKDSIGGWRELLLDYW

SEQ ID NO: 46723 - protein, 20 aa, Homo sapiens
CARDPRGGNYYRAYVHFDYW

SEQ ID NO: 46724 - protein, 17 aa, Homo sapiens
CAKVASPVASLWSWDYW

SEQ ID NO: 46725 - protein, 26 aa, Homo sapiens
CAGEDHIYCSGGSCYYDYTYYYMDVW

SEQ ID NO: 46726 - protein, 21 aa, Homo sapiens
CARDARPPAQVNVAAPWFDPW

SEQ ID NO: 46727 - protein, 22 aa, Homo sapiens
CARHGNRSRLGPYYYYYYMDVW

SEQ ID NO: 46728 - protein, 22 aa, Homo sapiens
CARERKYYDTSGYYDDGYFDLW

SEQ ID NO: 46729 - protein, 21 aa, Homo sapiens
CAKDIGRYYDSTGDRDAFDMW

SEQ ID NO: 46730 - protein, 17 aa, Homo sapiens
CARRPRGYTYDYYFDYW

SEQ ID NO: 46731 - protein, 18 aa, Homo sapiens
CAKDTGAWWQTSSIFEYW

SEQ ID NO: 46732 - protein, 17 aa, Homo sapiens
CVHIRYASGSYVLFDYW

SEQ ID NO: 46733 - protein, 15 aa, Homo sapiens
CAKDVGLLLSTFDPW

SEQ ID NO: 46734 - protein, 15 aa, Homo sapiens
CAREEDTAMGTGDYW

SEQ ID NO: 46735 - protein, 15 aa, Homo sapiens
CGSYISGSFFNFDFW

SEQ ID NO: 46736 - protein, 17 aa, Homo sapiens
CATDAGGRDGYYLFDYW

SEQ ID NO: 46737 - protein, 13 aa, Homo sapiens
CQQYNSYFRLYSF

SEQ ID NO: 46738 - protein, 16 aa, Homo sapiens
CAKDYVGAGFDAFDIW

SEQ ID NO: 46739 - protein, 17 aa, Homo sapiens
CARDNDTSNHLSHYDYW

SEQ ID NO: 46740 - protein, 15 aa, Homo sapiens
CAKGGVMVRGVIDYW

SEQ ID NO: 46741 - protein, 18 aa, Homo sapiens
CVKDKALRIYGRDAFDLW

SEQ ID NO: 46742 - protein, 21 aa, Homo sapiens
CAKMGLEGNYDILTGPPFDYW

SEQ ID NO: 46743 - protein, 16 aa, Homo sapiens
CARPPNPNIYWYFDLW

SEQ ID NO: 46744 - protein, 17 aa, Homo sapiens
CAKDLGGYDFSDAFDIW

SEQ ID NO: 46745 - protein, 19 aa, Homo sapiens
CVKDLIELMVYASYYMDVW

SEQ ID NO: 46746 - protein, 12 aa, Homo sapiens
CASNYYGSFDHW

SEQ ID NO: 46747 - protein, 19 aa, Homo sapiens
CARDDKEGYTYGDGGFDYW

SEQ ID NO: 46748 - protein, 20 aa, Homo sapiens
CARDSLYSSAWVPHNWFDPW

SEQ ID NO: 46749 - protein, 17 aa, Homo sapiens
CAKDRTPKFLEWLFDRW

SEQ ID NO: 46750 - protein, 18 aa, Homo sapiens
CASGGNASPVMRGWFDPW

SEQ ID NO: 46751 - protein, 23 aa, Homo sapiens
CARTRFNYHDTRGFSSNDGFDIW

SEQ ID NO: 46752 - protein, 21 aa, Homo sapiens
CAKDLNTAAMVSYREYYFDYW

SEQ ID NO: 46753 - protein, 19 aa, Homo sapiens
CARKSLASSGWYGTAFDFW

SEQ ID NO: 46754 - protein, 15 aa, Homo sapiens
CARQPAVIRWYFDQW

SEQ ID NO: 46755 - protein, 17 aa, Homo sapiens
CAKTDQSSAWDHGVDYW

SEQ ID NO: 46756 - protein, 16 aa, Homo sapiens
CARSRITMIVDYFDYW

SEQ ID NO: 46757 - protein, 18 aa, Homo sapiens
CARDRPTPIGAAGTLDYW

SEQ ID NO: 46758 - protein, 18 aa, Homo sapiens
CAKDKAGSTVLYYYMDVW

SEQ ID NO: 46759 - protein, 14 aa, Homo sapiens
CAREGEAVAGIDYW

SEQ ID NO: 46760 - protein, 17 aa, Homo sapiens
CARSGSYTGTYFTFDYW

SEQ ID NO: 46761 - protein, 17 aa, Homo sapiens
CVKGDGSTWYRASFDYW

SEQ ID NO: 46762 - protein, 17 aa, Homo sapiens
CAKDRHIVATISYMDVW

SEQ ID NO: 46763 - protein, 23 aa, Homo sapiens
CARIQPYYDSSGYYYGLGAFDIW

SEQ ID NO: 46764 - protein, 17 aa, Homo sapiens
CARAGIDNFENSYLDYW

SEQ ID NO: 46765 - protein, 24 aa, Homo sapiens
CARAAKLLWFGELLGVRPYYFDSW

SEQ ID NO: 46766 - protein, 18 aa, Homo sapiens
CAKDIHITMVRGRNFDYW

SEQ ID NO: 46767 - protein, 16 aa, Homo sapiens
CASNGLGDAYNYFDYW

SEQ ID NO: 46768 - protein, 15 aa, Homo sapiens
CARDVGTLTFRFDPW

SEQ ID NO: 46769 - protein, 14 aa, Homo sapiens
CAKIITAASYMDVW

SEQ ID NO: 46770 - protein, 23 aa, Homo sapiens
CARGEDFVEVLAAFSYYYYMDVW

SEQ ID NO: 46771 - protein, 18 aa, Homo sapiens
CARDKFAATLTTDAFDIW

SEQ ID NO: 46772 - protein, 24 aa, Homo sapiens
CARHPRVLLWVGELLSEDDPFEIW

SEQ ID NO: 46773 - protein, 16 aa, Homo sapiens
CASLVFSTPLDWFDPW

SEQ ID NO: 46774 - protein, 21 aa, Homo sapiens
CVRESDVLLDKYDNSGHLDYW

SEQ ID NO: 46775 - protein, 22 aa, Homo sapiens
CAKTGFVDYDILTGHEGYFDYW

SEQ ID NO: 46776 - protein, 17 aa, Homo sapiens
CARDLDSSGYYSSFDCW

SEQ ID NO: 46777 - protein, 14 aa, Homo sapiens
CAREPDGSYSFDSW

SEQ ID NO: 46778 - protein, 17 aa, Homo sapiens
CARRRVVAATYDAFDIW

SEQ ID NO: 46779 - protein, 23 aa, Homo sapiens
CARAVSGYRELLLLDYYYYMDVW

SEQ ID NO: 46780 - protein, 13 aa, Homo sapiens
CQSSDRSGKSVIF

SEQ ID NO: 46781 - protein, 18 aa, Homo sapiens
CARGSATGSYFKRPFDTW

SEQ ID NO: 46782 - protein, 21 aa, Homo sapiens
CARADGYHETSGYYPYYFDYW

SEQ ID NO: 46783 - protein, 16 aa, Homo sapiens
CVRHVVVAPSSYMDVW

SEQ ID NO: 46784 - protein, 11 aa, Homo sapiens
CQQYDIFPYMF

SEQ ID NO: 46785 - protein, 12 aa, Homo sapiens
CARNGPSLFDYW

SEQ ID NO: 46786 - protein, 18 aa, Homo sapiens
CARDGALGEWLVRYFDYW

SEQ ID NO: 46787 - protein, 22 aa, Homo sapiens
CAREGRGYSYGAASYYYYMDVW

SEQ ID NO: 46788 - protein, 20 aa, Homo sapiens
CARDFFYDYGDYRYNWFDPW

SEQ ID NO: 46789 - protein, 24 aa, Homo sapiens
CARHRVAMIPFGSFMDIYDAFDIW

SEQ ID NO: 46790 - protein, 21 aa, Homo sapiens
CATKKPITFYSETSGFEFDYW

SEQ ID NO: 46791 - protein, 27 aa, Homo sapiens
CARETSGTYYSPLEGGHLGYKYYMDVW

SEQ ID NO: 46792 - protein, 22 aa, Homo sapiens
CARREKQWLALPRGGWKYFDYW

SEQ ID NO: 46793 - protein, 16 aa, Homo sapiens
CARVHGWYKGDAFDIW

SEQ ID NO: 46794 - protein, 20 aa, Homo sapiens
CARHYDSLTGYQGGSAFDIW

SEQ ID NO: 46795 - protein, 18 aa, Homo sapiens
CARLMGFREYQLLLFDYW

SEQ ID NO: 46796 - protein, 17 aa, Homo sapiens
CAKDSEVAVAGHFFDYW

SEQ ID NO: 46797 - protein, 17 aa, Homo sapiens
CVKVSEQRLLPDAFDIW

SEQ ID NO: 46798 - protein, 13 aa, Homo sapiens
CARGGGYTFFDLW

SEQ ID NO: 46799 - protein, 20 aa, Homo sapiens
CARAHYYDISGYYSFDFDYW

SEQ ID NO: 46800 - protein, 22 aa, Homo sapiens
CARVIWVSLGRGAYYYYYMDVW

SEQ ID NO: 46801 - protein, 18 aa, Homo sapiens
CARLARDQFDSSGYPDYW

SEQ ID NO: 46802 - protein, 22 aa, Homo sapiens
CAHSVQTFREYSGYDFGEIDYW

SEQ ID NO: 46803 - protein, 16 aa, Homo sapiens
CAKDITMIVVVNLDYW

SEQ ID NO: 46804 - protein, 19 aa, Homo sapiens
CVKDFLARGNVPSTTFDHW

SEQ ID NO: 46805 - protein, 17 aa, Homo sapiens
CARDSEGSGYWIPFDYW

SEQ ID NO: 46806 - protein, 17 aa, Homo sapiens
CVRDFSTFGVLIRRDYW

SEQ ID NO: 46807 - protein, 15 aa, Homo sapiens
CASAAELPPYYLDHW

SEQ ID NO: 46808 - protein, 22 aa, Homo sapiens
CARHGEYCSGGSCSPGTWFDPW

SEQ ID NO: 46809 - protein, 15 aa, Homo sapiens
CARDSGYTNGHFDSW

SEQ ID NO: 46810 - protein, 23 aa, Homo sapiens
CARDVSNIVVVTASTTNENFDYW

SEQ ID NO: 46811 - protein, 22 aa, Homo sapiens
CARASRFDIVVIPAADDALDIW

SEQ ID NO: 46812 - protein, 18 aa, Homo sapiens
CARDRSIAVAGMYYFDYW

SEQ ID NO: 46813 - protein, 15 aa, Homo sapiens
CAHPRFGTTNWFDPW

SEQ ID NO: 46814 - protein, 14 aa, Homo sapiens
CQSYDISLRAHWAF

SEQ ID NO: 46815 - protein, 22 aa, Homo sapiens
CARDKGDHRGYFGELLPRFDSW

SEQ ID NO: 46816 - protein, 18 aa, Homo sapiens
CARDRDHIFWSGYALDYW

SEQ ID NO: 46817 - protein, 17 aa, Homo sapiens
CTKDTAADGFWEGFDIW

SEQ ID NO: 46818 - protein, 12 aa, Homo sapiens
CANFVGWAFDYW

SEQ ID NO: 46819 - protein, 13 aa, Homo sapiens
CTRRGDGYSGDYW

SEQ ID NO: 46820 - protein, 17 aa, Homo sapiens
CARRFSSGRSLLWFDPW

SEQ ID NO: 46821 - protein, 16 aa, Homo sapiens
CARDRGYWPRFVTDYW

SEQ ID NO: 46822 - protein, 16 aa, Homo sapiens
CAKVATWREFMAFDIW

SEQ ID NO: 46823 - protein, 19 aa, Homo sapiens
CARGGYYSGIPSWDWFDPW

SEQ ID NO: 46824 - protein, 19 aa, Homo sapiens
CAKEVAAAADFAYDAFDIW

SEQ ID NO: 46825 - protein, 18 aa, Homo sapiens
CARMTPAVASGYNWFDPW

SEQ ID NO: 46826 - protein, 15 aa, Homo sapiens
CARSTQVVVPALDYW

SEQ ID NO: 46827 - protein, 15 aa, Homo sapiens
CARGGGFGEFSFDYW

SEQ ID NO: 46828 - protein, 24 aa, Homo sapiens
CARVPPTTFIAAAGHYSYYYMDVW

SEQ ID NO: 46829 - protein, 16 aa, Homo sapiens
CAKDLSGDGYSPFDYW

SEQ ID NO: 46830 - protein, 13 aa, Homo sapiens
CAIHDGRYPLDYW

SEQ ID NO: 46831 - protein, 18 aa, Homo sapiens
CARDDNIWGGYGWAFDSW

SEQ ID NO: 46832 - protein, 17 aa, Homo sapiens
CARALDVVTNHDAFDTW

SEQ ID NO: 46833 - protein, 19 aa, Homo sapiens
CARVRDSSGYYYEDAFDIW

SEQ ID NO: 46834 - protein, 16 aa, Homo sapiens
CARARAIVVVRYFDYW

SEQ ID NO: 46835 - protein, 14 aa, Homo sapiens
CARAPSGGNFFDSW

SEQ ID NO: 46836 - protein, 15 aa, Homo sapiens
CAKEGGGSRYSFDYW

SEQ ID NO: 46837 - protein, 19 aa, Homo sapiens
CAKSYGDYVWDYYYYMDVW

SEQ ID NO: 46838 - protein, 22 aa, Homo sapiens
CARSYASCDGDCSSGLEWFDPW

SEQ ID NO: 46839 - protein, 32 aa, Homo sapiens
CALPISDTAMYYCARHRAFGSRRRYYYYMDVW

SEQ ID NO: 46840 - protein, 26 aa, Homo sapiens
CARQVHPDRHCPSGVCYLAGYYFDYW

SEQ ID NO: 46841 - protein, 23 aa, Homo sapiens
CTRQATYYDILTGYYKERYFDLW

SEQ ID NO: 46842 - protein, 22 aa, Homo sapiens
CARADRDPSYDSGWYPHYFDSW

SEQ ID NO: 46843 - protein, 19 aa, Homo sapiens
CARVTSKDDNYALRFFDYW

SEQ ID NO: 46844 - protein, 16 aa, Homo sapiens
CASLPSGSGSYYFDYW

SEQ ID NO: 46845 - protein, 17 aa, Homo sapiens
CARQFETYYYHSSGDYW

SEQ ID NO: 46846 - protein, 14 aa, Homo sapiens
CARLVWSAAALDYW

SEQ ID NO: 46847 - protein, 18 aa, Homo sapiens
CARVIVGSPPAEYYFDSW

SEQ ID NO: 46848 - protein, 18 aa, Homo sapiens
CVRGYTANYFGTTSFDFW

SEQ ID NO: 46849 - protein, 18 aa, Homo sapiens
CAKGAQPPPRYYYYMDVW

SEQ ID NO: 46850 - protein, 17 aa, Homo sapiens
CAKDLVGWREVVVIDYW

SEQ ID NO: 46851 - protein, 22 aa, Homo sapiens
CASPSYYYDSSGYLRRETDDYW

SEQ ID NO: 46852 - protein, 21 aa, Homo sapiens
CAREYDSSGYYYYYYYYMDVW

SEQ ID NO: 46853 - protein, 24 aa, Homo sapiens
CAREERGYYYDSGNYYTYYYMDVW

SEQ ID NO: 46854 - protein, 23 aa, Homo sapiens
CVKDLTYYYESTDYYPPATFDHW

SEQ ID NO: 46855 - protein, 19 aa, Homo sapiens
CAKGAYYYDSRGFLLGDYW

SEQ ID NO: 46856 - protein, 12 aa, Homo sapiens
CTRGMATMYDYW

SEQ ID NO: 46857 - protein, 19 aa, Homo sapiens
CARGRHLGLSYHYYYIDVW

SEQ ID NO: 46858 - protein, 15 aa, Homo sapiens
CASSIAAASNWFDPW

SEQ ID NO: 46859 - protein, 17 aa, Homo sapiens
CATQLGIADHSWYFDLW

SEQ ID NO: 46860 - protein, 19 aa, Homo sapiens
CAKSPDIVVVPAATEYDYW

SEQ ID NO: 46861 - protein, 22 aa, Homo sapiens
CAREISGFREFGVGTRYYFDYW

SEQ ID NO: 46862 - protein, 19 aa, Homo sapiens
CVRSSGGPRIAAAGLFDSW

SEQ ID NO: 46863 - protein, 16 aa, Homo sapiens
CARFDNSGYNRFFDLW

SEQ ID NO: 46864 - protein, 17 aa, Homo sapiens
CAKERVLKYFGDALDVW

SEQ ID NO: 46865 - protein, 20 aa, Homo sapiens
CARRYCSGLSCYIWGYFDYW

SEQ ID NO: 46866 - protein, 18 aa, Homo sapiens
CARDPWYSGYQPSEFDYW

SEQ ID NO: 46867 - protein, 18 aa, Homo sapiens
CARQLGTIFGDGGTFDIW

SEQ ID NO: 46868 - protein, 17 aa, Homo sapiens
CAKSEEKWLVLGTYDYW

SEQ ID NO: 46869 - protein, 20 aa, Homo sapiens
CAKTRTEYCTGGSCSIFDYW

SEQ ID NO: 46870 - protein, 18 aa, Homo sapiens
CARAPRGYTNGGPLFDHW

SEQ ID NO: 46871 - protein, 24 aa, Homo sapiens
CARVGGVADRPGLDKSYYYYMDVW

SEQ ID NO: 46872 - protein, 21 aa, Homo sapiens
CARGPKASGWQPGGYYYMDVW

SEQ ID NO: 46873 - protein, 20 aa, Homo sapiens
CTTLVHIWGSYYLGYYFEYW

SEQ ID NO: 46874 - protein, 15 aa, Homo sapiens
CARGSQSGTEYFQHW

SEQ ID NO: 46875 - protein, 16 aa, Homo sapiens
CARSDDYSSNSAFDIW

SEQ ID NO: 46876 - protein, 17 aa, Homo sapiens
CVTDWVGPTSGDAFDIW

SEQ ID NO: 46877 - protein, 15 aa, Homo sapiens
CARDRTVTDHYMDVW

SEQ ID NO: 46878 - protein, 23 aa, Homo sapiens
CVRDVGYYDRSTYSYVSLNFDIW

SEQ ID NO: 46879 - protein, 16 aa, Homo sapiens
CATAQGHYYTYWFDPW

SEQ ID NO: 46880 - protein, 18 aa, Homo sapiens
CAKDRGPYSSAWSGLDYW

SEQ ID NO: 46881 - protein, 16 aa, Homo sapiens
CAKPPGSGPADAFDIW

SEQ ID NO: 46882 - protein, 16 aa, Homo sapiens
CAKDISAYFREAFDVW

SEQ ID NO: 46883 - protein, 26 aa, Homo sapiens
CAKESRSHNEILTGRREPPNDAFGMW

SEQ ID NO: 46884 - protein, 16 aa, Homo sapiens
CARQPTSVPFTHFDYW

SEQ ID NO: 46885 - protein, 17 aa, Homo sapiens
CARGPGMGTVSGAFDVW

SEQ ID NO: 46886 - protein, 18 aa, Homo sapiens
CARDGAGGSGSFYGFDIW

SEQ ID NO: 46887 - protein, 17 aa, Homo sapiens
CAKEGYTHGRTPNFDYW

SEQ ID NO: 46888 - protein, 23 aa, Homo sapiens
CARDGISQHGSGSYYRYNWFDPW

SEQ ID NO: 46889 - protein, 22 aa, Homo sapiens
CAHRPSWYYYDSSGFYPVFAYW

SEQ ID NO: 46890 - protein, 16 aa, Homo sapiens
CARGWELNYFTYFDLW

SEQ ID NO: 46891 - protein, 13 aa, Homo sapiens
CARFMAAADFDYW

SEQ ID NO: 46892 - protein, 19 aa, Homo sapiens
CARGMREWLRTSRTWLDPW

SEQ ID NO: 46893 - protein, 19 aa, Homo sapiens
CARSPGYSSGWYPDYFDLW

SEQ ID NO: 46894 - protein, 15 aa, Homo sapiens
CARVGGYGYGAFDIW

SEQ ID NO: 46895 - protein, 18 aa, Homo sapiens
CARVFYGDDQGGYYFDSW

SEQ ID NO: 46896 - protein, 22 aa, Homo sapiens
CATCGGDCSAEYYFYDYYMDVW

SEQ ID NO: 46897 - protein, 15 aa, Homo sapiens
CARDIAARFYYFDYW

SEQ ID NO: 46898 - protein, 16 aa, Homo sapiens
CARHGNSGWADYFDFW

SEQ ID NO: 46899 - protein, 18 aa, Homo sapiens
CARGSRGRSTYYNPFDSW

SEQ ID NO: 46900 - protein, 18 aa, Homo sapiens
CARGKFGYSYGLDYMDVW

SEQ ID NO: 46901 - protein, 17 aa, Homo sapiens
CAKDLSRGSFPEYFLHW

SEQ ID NO: 46902 - protein, 20 aa, Homo sapiens
CARDKRTVTTYYYYYYMDVW

SEQ ID NO: 46903 - protein, 18 aa, Homo sapiens
CAKFLVDTSVGASVFDVW

SEQ ID NO: 46904 - protein, 12 aa, Homo sapiens
CVKRLSRTFDHW

SEQ ID NO: 46905 - protein, 19 aa, Homo sapiens
CAREGGIAAAGRGYYFDFW

SEQ ID NO: 46906 - protein, 22 aa, Homo sapiens
CAKDPGGPSGSGSFAPYYMDVW

SEQ ID NO: 46907 - protein, 20 aa, Homo sapiens
CTTEGGGWFGELGTYYFDHW

SEQ ID NO: 46908 - protein, 24 aa, Homo sapiens
CARERFKNYDALTGYFLPNWFDPW

SEQ ID NO: 46909 - protein, 16 aa, Homo sapiens
CALHQGRDGFLSFDFW

SEQ ID NO: 46910 - protein, 19 aa, Homo sapiens
CAKIWFPLIMGGSSYFDYW

SEQ ID NO: 46911 - protein, 19 aa, Homo sapiens
CAKGHDYAWGSYPYYFDSW

SEQ ID NO: 46912 - protein, 22 aa, Homo sapiens
CASFRGSSRSYTWAPYGAFDMW

SEQ ID NO: 46913 - protein, 18 aa, Homo sapiens
CATSPTMGSSWDYYFDYW

SEQ ID NO: 46914 - protein, 18 aa, Homo sapiens
CAKGALVALIWEDAFDFW

SEQ ID NO: 46915 - protein, 17 aa, Homo sapiens
CAEGGFTYNSYIWFGPW

SEQ ID NO: 46916 - protein, 21 aa, Homo sapiens
CAKHQEELTGIGVITSRFDPW

SEQ ID NO: 46917 - protein, 17 aa, Homo sapiens
CVKEFDIGEVVFYMDVW

SEQ ID NO: 46918 - protein, 19 aa, Homo sapiens
CVTYADYDILTGYHTIDYW

SEQ ID NO: 46919 - protein, 21 aa, Homo sapiens
CARGLGYCTSTNCYNNYFDPW

SEQ ID NO: 46920 - protein, 25 aa, Homo sapiens
CSLKDSDTAMYYCARRLDSTFVDYW

SEQ ID NO: 46921 - protein, 16 aa, Homo sapiens
CARHVGRAYPDYFDYW

SEQ ID NO: 46922 - protein, 21 aa, Homo sapiens
CARTYCSGSSCYSGYSYMDVW

SEQ ID NO: 46923 - protein, 16 aa, Homo sapiens
CARGPYIVGATPFDYW

SEQ ID NO: 46924 - protein, 21 aa, Homo sapiens
CARGDGNYNAIDQDDFYMDVW

SEQ ID NO: 46925 - protein, 18 aa, Homo sapiens
CARAVGRLIWDSYYFDYW

SEQ ID NO: 46926 - protein, 15 aa, Homo sapiens
CAKDFEGGLLGFDYW

SEQ ID NO: 46927 - protein, 17 aa, Homo sapiens
CTRAIVVVTAINAFEIW

SEQ ID NO: 46928 - protein, 24 aa, Homo sapiens
CARRTSGSSGSPRRGGWGRWLDPW

SEQ ID NO: 46929 - protein, 16 aa, Homo sapiens
CARARYSTSWSLFDYW

SEQ ID NO: 46930 - protein, 23 aa, Homo sapiens
CAKQHASRSYYDSSVGAYTFDIW

SEQ ID NO: 46931 - protein, 24 aa, Homo sapiens
CARCRGCYSSSSLRGPYTYYFDYW

SEQ ID NO: 46932 - protein, 20 aa, Homo sapiens
CARHYYDTSGYQYGYYFDYW

SEQ ID NO: 46933 - protein, 13 aa, Homo sapiens
CARANQDDPFDYW

SEQ ID NO: 46934 - protein, 15 aa, Homo sapiens
CAGGERQFWYYFDYW

SEQ ID NO: 46935 - protein, 17 aa, Homo sapiens
CARDRSVSYDSEAFDIW

SEQ ID NO: 46936 - protein, 16 aa, Homo sapiens
CARWGIEEMATIYDYW

SEQ ID NO: 46937 - protein, 18 aa, Homo sapiens
CVRHRMTSYSLNNWFDAW

SEQ ID NO: 46938 - protein, 15 aa, Homo sapiens
CAKGAQTMWDALDLW

SEQ ID NO: 46939 - protein, 20 aa, Homo sapiens
CARERGYCTGGSCRGWFDPW

SEQ ID NO: 46940 - protein, 13 aa, Homo sapiens
CASGYNILTGDYW

SEQ ID NO: 46941 - protein, 19 aa, Homo sapiens
CARGDCGGDCFAGYWFDSW

SEQ ID NO: 46942 - protein, 21 aa, Homo sapiens
CAREGVVILGEVIVSGAFDIW

SEQ ID NO: 46943 - protein, 23 aa, Homo sapiens
CARGTSARGYTYYSNRFFRFDSW

SEQ ID NO: 46944 - protein, 19 aa, Homo sapiens
CARLSDCTNGVCYSIIDYW

SEQ ID NO: 46945 - protein, 15 aa, Homo sapiens
CAKHRQYYGSVTDYW

SEQ ID NO: 46946 - protein, 21 aa, Homo sapiens
CAITGPPDYSSGSAYYYFEYW

SEQ ID NO: 46947 - protein, 24 aa, Homo sapiens
CAGGARLKEDSLYSGSYPSRFDYW

SEQ ID NO: 46948 - protein, 21 aa, Homo sapiens
CARDQRGYSYGRFYSYYMDVW

SEQ ID NO: 46949 - protein, 14 aa, Homo sapiens
CAKADEEMANFEYW

SEQ ID NO: 46950 - protein, 20 aa, Homo sapiens
CARRPRVLFWFGKLSHFDYW

SEQ ID NO: 46951 - protein, 20 aa, Homo sapiens
CARGIEYDHLTLYPGALDVW

SEQ ID NO: 46952 - protein, 21 aa, Homo sapiens
CTREAYVGQGQRDVTNAFDLW

SEQ ID NO: 46953 - protein, 35 aa, Homo sapiens
CTAYLQWSSLKASDSAMYYCASFAGVYSHDPFDIW

SEQ ID NO: 46954 - protein, 17 aa, Homo sapiens
CARGWGSPMGSYYFDYW

SEQ ID NO: 46955 - protein, 16 aa, Homo sapiens
CARDGGWAVAGTGDYW

SEQ ID NO: 46956 - protein, 12 aa, Homo sapiens
CAVVEGFSFDYW

SEQ ID NO: 46957 - protein, 18 aa, Homo sapiens
CASESDSSGYTDDAFDIW

SEQ ID NO: 46958 - protein, 22 aa, Homo sapiens
CATAPPQWSYYGSGSYYYLDYW

SEQ ID NO: 46959 - protein, 15 aa, Homo sapiens
CARSEHFYYYYMDVW

SEQ ID NO: 46960 - protein, 15 aa, Homo sapiens
CVSEPRRGSQYFDLW

SEQ ID NO: 46961 - protein, 17 aa, Homo sapiens
CARHGWNGAFLDWLDPW

SEQ ID NO: 46962 - protein, 22 aa, Homo sapiens
CARDLYYFDSNGDYITEYFQHW

SEQ ID NO: 46963 - protein, 21 aa, Homo sapiens
CARSAEGSGSLGFYYNYMDVW

SEQ ID NO: 46964 - protein, 21 aa, Homo sapiens
CVDVAGLGFSTSWPAGYFDFW

SEQ ID NO: 46965 - protein, 15 aa, Homo sapiens
CARHEATHWHYFGYW

SEQ ID NO: 46966 - protein, 18 aa, Homo sapiens
CAKRQCLNSVCYDTFDMW

SEQ ID NO: 46967 - protein, 17 aa, Homo sapiens
CAKDSSGYYQLGNFDYW

SEQ ID NO: 46968 - protein, 16 aa, Homo sapiens
CASRLAARGGNWFDPW

SEQ ID NO: 46969 - protein, 23 aa, Homo sapiens
CARTTQYNDDGGAYYTADAFDMW

SEQ ID NO: 46970 - protein, 16 aa, Homo sapiens
CASFSGDFIGDAFQTW

SEQ ID NO: 46971 - protein, 17 aa, Homo sapiens
CTKNPNMAASGLYFEPW

SEQ ID NO: 46972 - protein, 15 aa, Homo sapiens
CARSLEGVTDWFDSW

SEQ ID NO: 46973 - protein, 22 aa, Homo sapiens
CAKEKGDDYGSRSYYNARFDYW

SEQ ID NO: 46974 - protein, 15 aa, Homo sapiens
CAKSLDRLLDPFDYW

SEQ ID NO: 46975 - protein, 15 aa, Homo sapiens
CAKDIYDSIRGLDYW

SEQ ID NO: 46976 - protein, 21 aa, Homo sapiens
CARTYYYDSSGYYPLYYFDYW

SEQ ID NO: 46977 - protein, 18 aa, Homo sapiens
CAKDLSLWFGELRGLDYW

SEQ ID NO: 46978 - protein, 16 aa, Homo sapiens
CASFAGVYSHDPFDIW

SEQ ID NO: 46979 - protein, 20 aa, Homo sapiens
CVRDSIPAVSVSGTYYFAYW

SEQ ID NO: 46980 - protein, 18 aa, Homo sapiens
CARRRLEDVRVLTAFDIW

SEQ ID NO: 46981 - protein, 16 aa, Homo sapiens
CARHIPNSWPSPFDYW

SEQ ID NO: 46982 - protein, 17 aa, Homo sapiens
CAKHNGDAYNYEFFDYW

SEQ ID NO: 46983 - protein, 16 aa, Homo sapiens
CARELPAAEEYYFDYW

SEQ ID NO: 46984 - protein, 20 aa, Homo sapiens
CAKDVTVGSAMILTGGFDSW

SEQ ID NO: 46985 - protein, 16 aa, Homo sapiens
CARQRHTDYSNVFDYW

SEQ ID NO: 46986 - protein, 22 aa, Homo sapiens
CARDTGGYSSSSFNYYYYTDVW

SEQ ID NO: 46987 - protein, 15 aa, Homo sapiens
CVRDLWFPLYYFDYW

SEQ ID NO: 46988 - protein, 13 aa, Homo sapiens
CARVRFGEGFDLW

SEQ ID NO: 46989 - protein, 19 aa, Homo sapiens
CARASEWLSLGSVGAFNIW

SEQ ID NO: 46990 - protein, 21 aa, Homo sapiens
CATVRKSGGNCFFCYYYMDVW

SEQ ID NO: 46991 - protein, 16 aa, Homo sapiens
CARGPPGSGTNILDYW

SEQ ID NO: 46992 - protein, 17 aa, Homo sapiens
CARGPLVGSTMGGFDYW

SEQ ID NO: 46993 - protein, 21 aa, Homo sapiens
CANDLFDDLTTSYTSNYFQYW

SEQ ID NO: 46994 - protein, 14 aa, Homo sapiens
CARHGSYRSGFDPW

SEQ ID NO: 46995 - protein, 19 aa, Homo sapiens
CAREASPRTYEGNLLPDYW

SEQ ID NO: 46996 - protein, 27 aa, Homo sapiens
CARDSRPEDILTLIRGGRDPFDAFDIW

SEQ ID NO: 46997 - protein, 16 aa, Homo sapiens
CVRYNSAWMLDAFDIW

SEQ ID NO: 46998 - protein, 16 aa, Homo sapiens
CARQRGGSDWHQYDYW

SEQ ID NO: 46999 - protein, 21 aa, Homo sapiens
CAKDGDSDTYYYYYYYYLDVW

SEQ ID NO: 47000 - protein, 19 aa, Homo sapiens
CAKDMKHGRGYTYGGLDYW

SEQ ID NO: 47001 - protein, 19 aa, Homo sapiens
CASEYGAGSYYNIDAFDIW

SEQ ID NO: 47002 - protein, 14 aa, Homo sapiens
CVSASQDPFYFDHW

SEQ ID NO: 47003 - protein, 20 aa, Homo sapiens
CARDALSSSWYENHDAFDIW

SEQ ID NO: 47004 - protein, 18 aa, Homo sapiens
CARDREYLISMTGVFDYW

SEQ ID NO: 47005 - protein, 14 aa, Homo sapiens
CARSPAHYYYLDVW

SEQ ID NO: 47006 - protein, 13 aa, Homo sapiens
CAKERTFPAVDYW

SEQ ID NO: 47007 - protein, 18 aa, Homo sapiens
CARQLKHIVATMNAFDLW

SEQ ID NO: 47008 - protein, 11 aa, Homo sapiens
CFSGDEDNWVF

SEQ ID NO: 47009 - protein, 24 aa, Homo sapiens
CARALGARPTYYYTNRGYYTFDHW

SEQ ID NO: 47010 - protein, 21 aa, Homo sapiens
CAKISRDPFGSGSYEYYFDYW

SEQ ID NO: 47011 - protein, 15 aa, Homo sapiens
CARGSGSYFGAFDFW

SEQ ID NO: 47012 - protein, 19 aa, Homo sapiens
CARGRIPMVRGVLNDFDPW

SEQ ID NO: 47013 - protein, 16 aa, Homo sapiens
CAREPYGLGLKYFDPW

SEQ ID NO: 47014 - protein, 19 aa, Homo sapiens
CARYSTIMRGILIHSFDPW

SEQ ID NO: 47015 - protein, 26 aa, Homo sapiens
CAKDLYDCSGGNCFSGFFGWQGPDYW

SEQ ID NO: 47016 - protein, 17 aa, Homo sapiens
CATSSSSTFYLRTFDIW

SEQ ID NO: 47017 - protein, 24 aa, Homo sapiens
CAIVGSPRKYCPSTSCYPYYFDYW

SEQ ID NO: 47018 - protein, 18 aa, Homo sapiens
CTRVYYSSSWYEGAFDKW

SEQ ID NO: 47019 - protein, 16 aa, Homo sapiens
CAKSLHIVGANPFDYW

SEQ ID NO: 47020 - protein, 13 aa, Homo sapiens
CAKDSGDYAFDFW

SEQ ID NO: 47021 - protein, 24 aa, Homo sapiens
CARQKVVQFLEWYANYFYDYMDVW

SEQ ID NO: 47022 - protein, 17 aa, Homo sapiens
CARVLNDETTDGAFDIW

SEQ ID NO: 47023 - protein, 13 aa, Homo sapiens
CAQTSGPNWFDPW

SEQ ID NO: 47024 - protein, 16 aa, Homo sapiens
CARGSGAFTENWCDPW

SEQ ID NO: 47025 - protein, 17 aa, Homo sapiens
CARPAEGAVSAYYFDLW

SEQ ID NO: 47026 - protein, 17 aa, Homo sapiens
CATTSGYNGYWGYFHYW

SEQ ID NO: 47027 - protein, 16 aa, Homo sapiens
CARPGGSITGYDSDYW

SEQ ID NO: 47028 - protein, 14 aa, Homo sapiens
CARDPGSLMVFDHW

SEQ ID NO: 47029 - protein, 22 aa, Homo sapiens
CARPGATGSYYKTPSRWFFDLW

SEQ ID NO: 47030 - protein, 18 aa, Homo sapiens
CARHPPYSGSYSPFFDYW

SEQ ID NO: 47031 - protein, 20 aa, Homo sapiens
CARGLDYCGAGAQCYSFDTW

SEQ ID NO: 47032 - protein, 18 aa, Homo sapiens
CARQRHFYGSGSPHFDYW

SEQ ID NO: 47033 - protein, 16 aa, Homo sapiens
CARTSGYYGPDGSDVW

SEQ ID NO: 47034 - protein, 16 aa, Homo sapiens
CATSASGTDYLPFDYW

SEQ ID NO: 47035 - protein, 18 aa, Homo sapiens
CVINYYASGSYYYFPDYW

SEQ ID NO: 47036 - protein, 16 aa, Homo sapiens
CARRGFYGGNPPFDEW

SEQ ID NO: 47037 - protein, 18 aa, Homo sapiens
CASSMDIVVVPAAALDYW

SEQ ID NO: 47038 - protein, 17 aa, Homo sapiens
CAKDKEWELRWGVFDTW

SEQ ID NO: 47039 - protein, 16 aa, Homo sapiens
CARDGGPGLMGNVDYW

SEQ ID NO: 47040 - protein, 17 aa, Homo sapiens
CTRTHTSSAGLDAFDIW

SEQ ID NO: 47041 - protein, 17 aa, Homo sapiens
CAKDAILTDYYVSADYW

SEQ ID NO: 47042 - protein, 17 aa, Homo sapiens
CGNRRGSGWYGGAFDNW

SEQ ID NO: 47043 - protein, 17 aa, Homo sapiens
CAREEATGDGFDAFDIW

SEQ ID NO: 47044 - protein, 13 aa, Homo sapiens
CARRLDSTFVDYW

SEQ ID NO: 47045 - protein, 19 aa, Homo sapiens
CASDLTYNGDDYVSAFDIW

SEQ ID NO: 47046 - protein, 20 aa, Homo sapiens
CARMPVEYSSGSYLYYFDFW

SEQ ID NO: 47047 - protein, 17 aa, Homo sapiens
CARGPLKLARYWYFDLW

SEQ ID NO: 47048 - protein, 20 aa, Homo sapiens
CARVDYYGSGSYGYGWFDPW

SEQ ID NO: 47049 - protein, 19 aa, Homo sapiens
CARDRDLGWFEGLSPFDPW

SEQ ID NO: 47050 - protein, 21 aa, Homo sapiens
CAKDAETYYYETSGYYYFDDW

SEQ ID NO: 47051 - protein, 22 aa, Homo sapiens
CARVEYSRSYLPHYYFYYMDVW

SEQ ID NO: 47052 - protein, 20 aa, Homo sapiens
CARTTGAIDFYDNSGYLHYW

SEQ ID NO: 47053 - protein, 22 aa, Homo sapiens
CARTYVVVVSTTMEFGSHFDHW

SEQ ID NO: 47054 - protein, 18 aa, Homo sapiens
CARAQNYGSTKVLYLDSW

SEQ ID NO: 47055 - protein, 17 aa, Homo sapiens
CAKDISSSGWYEGLDYW

SEQ ID NO: 47056 - protein, 16 aa, Homo sapiens
CARQAGVAGDWYFDLW

SEQ ID NO: 47057 - protein, 18 aa, Homo sapiens
CTRETGFRGLSPSRFDPW

SEQ ID NO: 47058 - protein, 21 aa, Homo sapiens
CARASGGSGYYGLRRNWFDPW

SEQ ID NO: 47059 - protein, 16 aa, Homo sapiens
CAKDSDPVIAVALDYW

SEQ ID NO: 47060 - protein, 19 aa, Homo sapiens
CARAFEYCRGRKCADFDYW

SEQ ID NO: 47061 - protein, 16 aa, Homo sapiens
CARDGSAWGANWFDPW

SEQ ID NO: 47062 - protein, 14 aa, Homo sapiens
CARYHYEGSGLDYW

SEQ ID NO: 47063 - protein, 22 aa, Homo sapiens
CARARDEFYFNSGGYHYYFDYW

SEQ ID NO: 47064 - protein, 13 aa, Homo sapiens
CAKGLNGDYLHYW

SEQ ID NO: 47065 - protein, 18 aa, Homo sapiens
CSYHYDSSGYYLTWFDPW

SEQ ID NO: 47066 - protein, 17 aa, Homo sapiens
CVTRGRLTLIVGPADYW

SEQ ID NO: 47067 - protein, 17 aa, Homo sapiens
CARDSDYRSGWGPTDYW

SEQ ID NO: 47068 - protein, 15 aa, Homo sapiens
CAKVQAGGPKAFDIW

SEQ ID NO: 47069 - protein, 14 aa, Homo sapiens
CARVPGSSWEFDYW

SEQ ID NO: 47070 - protein, 21 aa, Homo sapiens
CAKGRYYNFVLGFHSDSLDIW

SEQ ID NO: 47071 - protein, 17 aa, Homo sapiens
CARDGTYLRWLAQFDYW

SEQ ID NO: 47072 - protein, 20 aa, Homo sapiens
CAKASWAGYDRSGYRYFENW

SEQ ID NO: 47073 - protein, 17 aa, Homo sapiens
CARMGAAAGNPHAFDIW

SEQ ID NO: 47074 - protein, 17 aa, Homo sapiens
CIKDSSAAGTGFYFDFW

SEQ ID NO: 47075 - protein, 16 aa, Homo sapiens
CTRRRTAGTSDRFEIW

SEQ ID NO: 47076 - protein, 17 aa, Homo sapiens
CVRAIVFGVVMYYFDYW

SEQ ID NO: 47077 - protein, 18 aa, Homo sapiens
CAKDFLPNVLPDYYFDSW

SEQ ID NO: 47078 - protein, 15 aa, Homo sapiens
CAREGYYATSGFDYW

SEQ ID NO: 47079 - protein, 18 aa, Homo sapiens
CARGFGGVEMATTPIDYW

SEQ ID NO: 47080 - protein, 20 aa, Homo sapiens
CAVARGYSYDYKRYHWFDPW

SEQ ID NO: 47081 - protein, 18 aa, Homo sapiens
CARDSETSGSYGDAFDIW

SEQ ID NO: 47082 - protein, 18 aa, Homo sapiens
CAKDMLFYFDSGGHFDSW

SEQ ID NO: 47083 - protein, 20 aa, Homo sapiens
CAKDMERYFDWSHADAFDLW

SEQ ID NO: 47084 - protein, 16 aa, Homo sapiens
CVKGSGDDGNSHFDYW

SEQ ID NO: 47085 - protein, 18 aa, Homo sapiens
CATDYYDYRGYYNGRDYW

SEQ ID NO: 47086 - protein, 16 aa, Homo sapiens
CARVDLYTRVGAFDNW

SEQ ID NO: 47087 - protein, 19 aa, Homo sapiens
CARETDGRLGRFPDAFDVW

SEQ ID NO: 47088 - protein, 17 aa, Homo sapiens
CAKRGGSDTTMAYFDSW

SEQ ID NO: 47089 - protein, 13 aa, Homo sapiens
CQSLDRSGLQYVF

SEQ ID NO: 47090 - protein, 23 aa, Homo sapiens
CTKGGREGYGSGTYYETHYFDYW

SEQ ID NO: 47091 - protein, 23 aa, Homo sapiens
CAKDRGTVFAVGGVRVWNYFDAW

SEQ ID NO: 47092 - protein, 14 aa, Homo sapiens
CVRKYYSEGPFDIW

SEQ ID NO: 47093 - protein, 19 aa, Homo sapiens
CAKDKIRGYSYVIDAFDIW

SEQ ID NO: 47094 - protein, 18 aa, Homo sapiens
CAKEVYGRNSGIKWFDPW

SEQ ID NO: 47095 - protein, 16 aa, Homo sapiens
CAKDRSAYSSREVDYW

SEQ ID NO: 47096 - protein, 22 aa, Homo sapiens
CARGSDYYDDSGYYFSEYFQHW

SEQ ID NO: 47097 - protein, 12 aa, Homo sapiens
CTRTFSSNSDYW

SEQ ID NO: 47098 - protein, 18 aa, Homo sapiens
CAISRVETSSWYGPFDDW

SEQ ID NO: 47099 - protein, 18 aa, Homo sapiens
CASDTGGGLRRPFSFDIW

SEQ ID NO: 47100 - protein, 15 aa, Homo sapiens
CAGIEAAGLVYFDYW

SEQ ID NO: 47101 - protein, 17 aa, Homo sapiens
CAKGILKGVIITDFDCW

SEQ ID NO: 47102 - protein, 18 aa, Homo sapiens
CARRFKSGSGFLNWFDPW

SEQ ID NO: 47103 - protein, 17 aa, Homo sapiens
CARQEHATNWVRYFDYW

SEQ ID NO: 47104 - protein, 19 aa, Homo sapiens
CATFFRQASWHLGGWFDPW

SEQ ID NO: 47105 - protein, 15 aa, Homo sapiens
CAKDLTPGIGPIDYW

SEQ ID NO: 47106 - protein, 12 aa, Homo sapiens
CLQYASYSPYSF

SEQ ID NO: 47107 - protein, 20 aa, Homo sapiens
CASRIHIRRTLDLPDAFDLW

SEQ ID NO: 47108 - protein, 17 aa, Homo sapiens
CARAGGNRHLYWYFDLW

SEQ ID NO: 47109 - protein, 16 aa, Homo sapiens
CARHREDSRGWPFDYW

SEQ ID NO: 47110 - protein, 15 aa, Homo sapiens
CAKIGGDSGFLFDYW

SEQ ID NO: 47111 - protein, 16 aa, Homo sapiens
CARGSADKSGSFYDYW

SEQ ID NO: 47112 - protein, 17 aa, Homo sapiens
CASAIGNYDISGAFDVW

SEQ ID NO: 47113 - protein, 14 aa, Homo sapiens
CAAWHGSLSGPFVF

SEQ ID NO: 47114 - protein, 20 aa, Homo sapiens
CARAIRVVSVAATPRHFDYW

SEQ ID NO: 47115 - protein, 20 aa, Homo sapiens
CAREGDYYVNRAFQRYVDYW

SEQ ID NO: 47116 - protein, 25 aa, Homo sapiens
CARDADFRISIIRGVIMPRNWFDPW

SEQ ID NO: 47117 - protein, 18 aa, Homo sapiens
CARQTAEFSGYDRSIDYW

SEQ ID NO: 47118 - protein, 12 aa, Homo sapiens
CARGTSITVDYW

SEQ ID NO: 47119 - protein, 22 aa, Homo sapiens
CAKDSYYDSSGYYYHPYYFDYW

SEQ ID NO: 47120 - protein, 15 aa, Homo sapiens
CARYLGGNNWFFEYW

SEQ ID NO: 47121 - protein, 15 aa, Homo sapiens
CAQVVVITGDAFDIW

SEQ ID NO: 47122 - protein, 16 aa, Homo sapiens
CAKDMKSSWYGILDYW

SEQ ID NO: 47123 - protein, 13 aa, Homo sapiens
CASNHDDSGRDYW

SEQ ID NO: 47124 - protein, 16 aa, Homo sapiens
CVRGGYTGGEVWFDPW

SEQ ID NO: 47125 - protein, 23 aa, Homo sapiens
CAKGTLRKYYNFWSGYFNYFDYW

SEQ ID NO: 47126 - protein, 15 aa, Homo sapiens
CARARPSGVVPPDYW

SEQ ID NO: 47127 - protein, 22 aa, Homo sapiens
CARGSPPSITVFGVVASAYDIW

SEQ ID NO: 47128 - protein, 19 aa, Homo sapiens
CARVIEIAAARWDIAFDLW

SEQ ID NO: 47129 - protein, 16 aa, Homo sapiens
CATDDVQSGDLPFDFW

SEQ ID NO: 47130 - protein, 18 aa, Homo sapiens
CARVRGFDYGGPYYFDYW

SEQ ID NO: 47131 - protein, 23 aa, Homo sapiens
CARGPVVTIFGVAHYYYYYMDVW

SEQ ID NO: 47132 - protein, 18 aa, Homo sapiens
CVREGTTMAQKDDAFGIW

SEQ ID NO: 47133 - protein, 22 aa, Homo sapiens
CATSPLFTRYDPSGTFDHFDQW

SEQ ID NO: 47134 - protein, 20 aa, Homo sapiens
CVRHYYYDSGGYVYNWFDPW

SEQ ID NO: 47135 - protein, 14 aa, Homo sapiens
CARVTSVEGALDYW

SEQ ID NO: 47136 - protein, 15 aa, Homo sapiens
CAKALSSWYLGVDYW

SEQ ID NO: 47137 - protein, 15 aa, Homo sapiens
CARGYYDFSGGFDLW

SEQ ID NO: 47138 - protein, 26 aa, Homo sapiens
CTKSRPPSLGPPYSSGWNHKWHFDRW

SEQ ID NO: 47139 - protein, 17 aa, Homo sapiens
CASGEQWLVRLPYFDYW

SEQ ID NO: 47140 - protein, 16 aa, Homo sapiens
CARGGVRVSATATDYW

SEQ ID NO: 47141 - protein, 12 aa, Homo sapiens
CHQYGGSPLHSF

SEQ ID NO: 47142 - protein, 18 aa, Homo sapiens
CAKPQYYYDSDGSSFNYW

SEQ ID NO: 47143 - protein, 18 aa, Homo sapiens
CATKGPCGGDCYYYLDYW

SEQ ID NO: 47144 - protein, 18 aa, Homo sapiens
CARVKGRSHNYGGALDYW

SEQ ID NO: 47145 - protein, 16 aa, Homo sapiens
CARLWSITAAGTFDQW

SEQ ID NO: 47146 - protein, 22 aa, Homo sapiens
CATPGALGFRDAIGAQDAFDIW

SEQ ID NO: 47147 - protein, 25 aa, Homo sapiens
CARVSVEGFYYDSSGYYVPQDFHYW

SEQ ID NO: 47148 - protein, 19 aa, Homo sapiens
CARVPGNYQLLEMDAIDIW

SEQ ID NO: 47149 - protein, 12 aa, Homo sapiens
CVRAAGQDFDSW

SEQ ID NO: 47150 - protein, 22 aa, Homo sapiens
CARALYDLSNYYYVEGDWFDPW

SEQ ID NO: 47151 - protein, 15 aa, Homo sapiens
CTTDSLPGTFPFDYW

SEQ ID NO: 47152 - protein, 22 aa, Homo sapiens
CARDGDYYDSSGYYFLDAFDIW

SEQ ID NO: 47153 - protein, 15 aa, Homo sapiens
CARLDEITGGYADSW

SEQ ID NO: 47154 - protein, 12 aa, Homo sapiens
CTATSLRIFDYW

SEQ ID NO: 47155 - protein, 17 aa, Homo sapiens
CASEEGYGINGYIFDIW

SEQ ID NO: 47156 - protein, 19 aa, Homo sapiens
CARSQGGVLLSYREYFQHW

SEQ ID NO: 47157 - protein, 15 aa, Homo sapiens
CARVLYGSGSYLGYW

SEQ ID NO: 47158 - protein, 21 aa, Homo sapiens
CVKDTGIYYDNSGPGTPFDYW

SEQ ID NO: 47159 - protein, 18 aa, Homo sapiens
CARAGGGKKYVETYFDNW

SEQ ID NO: 47160 - protein, 21 aa, Homo sapiens
CARDQNYYDNSGHYTHWFDPW

SEQ ID NO: 47161 - protein, 11 aa, Homo sapiens
CARGYRYGEYW

SEQ ID NO: 47162 - protein, 19 aa, Homo sapiens
CARRRAGAAGKRGRYFDYW

SEQ ID NO: 47163 - protein, 17 aa, Homo sapiens
CTRGPRPRIWLEAFDIW

SEQ ID NO: 47164 - protein, 22 aa, Homo sapiens
CARDLTSGYYWGYFYYYYMDVW

SEQ ID NO: 47165 - protein, 21 aa, Homo sapiens
CAKLFPLVRGPISYHYYMDVW

SEQ ID NO: 47166 - protein, 18 aa, Homo sapiens
CAHTLPAAGTSDWYFALW

SEQ ID NO: 47167 - protein, 22 aa, Homo sapiens
CARDGDGYCNSAGCFGYAFDFW

SEQ ID NO: 47168 - protein, 23 aa, Homo sapiens
CARTGYYFSGSDSVDYYYYMDVW

SEQ ID NO: 47169 - protein, 21 aa, Homo sapiens
CARGSRRWLQLPPYYYYMDVW

SEQ ID NO: 47170 - protein, 18 aa, Homo sapiens
CARLSITARRAQGYFDPW

SEQ ID NO: 47171 - protein, 19 aa, Homo sapiens
CAKLYCGADCYPPGYMDVW

SEQ ID NO: 47172 - protein, 27 aa, Homo sapiens
CARQGAYYGSGDYPSRGLDYYYYMDVW

SEQ ID NO: 47173 - protein, 17 aa, Homo sapiens
CAKSGVRIAVAATFDFW

SEQ ID NO: 47174 - protein, 16 aa, Homo sapiens
CAHRVERGSYLAFDIW

SEQ ID NO: 47175 - protein, 18 aa, Homo sapiens
CAKDLWFGNNYYYYMDVW

SEQ ID NO: 47176 - protein, 18 aa, Homo sapiens
CARATTHFGVVIRWFDPW

SEQ ID NO: 47177 - protein, 21 aa, Homo sapiens
CATVMGSYDSSGYFGAYFDNW

SEQ ID NO: 47178 - protein, 13 aa, Homo sapiens
CATLRHYYHFDYW

SEQ ID NO: 47179 - protein, 16 aa, Homo sapiens
CARVAVDPGPSHFDYW

SEQ ID NO: 47180 - protein, 15 aa, Homo sapiens
CARGWRVREPPFSYW

SEQ ID NO: 47181 - protein, 20 aa, Homo sapiens
CAREVNYYTSGSSRDWFDPW

SEQ ID NO: 47182 - protein, 14 aa, Homo sapiens
CAKANLNDETLDYW

SEQ ID NO: 47183 - protein, 17 aa, Homo sapiens
CARGTLTGYSEDFFDYW

SEQ ID NO: 47184 - protein, 16 aa, Homo sapiens
CAHIQGSCYSGWFDPW

SEQ ID NO: 47185 - protein, 14 aa, Homo sapiens
CARGTSSGAFYDYW

SEQ ID NO: 47186 - protein, 15 aa, Homo sapiens
CARDTREYTPYDYAW

SEQ ID NO: 47187 - protein, 18 aa, Homo sapiens
CARGPGRNFWSGYWTDYW

SEQ ID NO: 47188 - protein, 21 aa, Homo sapiens
CARDRVAYYYDTGGYYSFAYW

SEQ ID NO: 47189 - protein, 16 aa, Homo sapiens
CAKLRRLGYHYYIDVW

SEQ ID NO: 47190 - protein, 14 aa, Homo sapiens
CARDAPGLAGFVYW

SEQ ID NO: 47191 - protein, 16 aa, Homo sapiens
CWLSAGARKNSIFDYW

SEQ ID NO: 47192 - protein, 21 aa, Homo sapiens
CARQVEGDNSGHFFSPAFDSW

SEQ ID NO: 47193 - protein, 14 aa, Homo sapiens
CARVDSRGESFDIW

SEQ ID NO: 47194 - protein, 16 aa, Homo sapiens
CARRKDYAHSRWFDPW

SEQ ID NO: 47195 - protein, 14 aa, Homo sapiens
CARDRATGRYFDSW

SEQ ID NO: 47196 - protein, 18 aa, Homo sapiens
CARDKVESYSGYNDFGYW

SEQ ID NO: 47197 - protein, 15 aa, Homo sapiens
CARGGLSERSSPDYW

SEQ ID NO: 47198 - protein, 15 aa, Homo sapiens
CAKDAFLKWNYVDSW

SEQ ID NO: 47199 - protein, 13 aa, Homo sapiens
CVGGINTAYFDYW

SEQ ID NO: 47200 - protein, 21 aa, Homo sapiens
CARNPFQPNYYDRSFRAFDFW

SEQ ID NO: 47201 - protein, 25 aa, Homo sapiens
CARMGSCGSTGCYEGYSHYYYMDVW

SEQ ID NO: 47202 - protein, 20 aa, Homo sapiens
CARGMTFVRGVMVDDAFDMW

SEQ ID NO: 47203 - protein, 16 aa, Homo sapiens
CARATYYDSSRYFDYW

SEQ ID NO: 47204 - protein, 17 aa, Homo sapiens
CAKDSRGGFLLRDFDYW

SEQ ID NO: 47205 - protein, 17 aa, Homo sapiens
CVKEYSNGWHGPNFDFW

SEQ ID NO: 47206 - protein, 17 aa, Homo sapiens
CARDDKIRLVRGVFWYW

SEQ ID NO: 47207 - protein, 19 aa, Homo sapiens
CARGDCGGDCSTYWYFDLW

SEQ ID NO: 47208 - protein, 16 aa, Homo sapiens
CAKDGGLDWTGYHDYW

SEQ ID NO: 47209 - protein, 21 aa, Homo sapiens
CARHRAAIPGTRYYQYYIDVW

SEQ ID NO: 47210 - protein, 25 aa, Homo sapiens
CAKNPYPHYFDVLTGDNYGTYFDYW

SEQ ID NO: 47211 - protein, 18 aa, Homo sapiens
CARGWSRAAGRTGYFDQW

SEQ ID NO: 47212 - protein, 24 aa, Homo sapiens
CAREKGAGVGPMWGTSAVYYYDYW

SEQ ID NO: 47213 - protein, 26 aa, Homo sapiens
CARDSPTSDDGFDSIWFDLEKWFDPW

SEQ ID NO: 47214 - protein, 17 aa, Homo sapiens
CATESSSGHDLTPFDHW

SEQ ID NO: 47215 - protein, 17 aa, Homo sapiens
CARGESAMVSSDYFDYW

SEQ ID NO: 47216 - protein, 15 aa, Homo sapiens
CALSSIASPSSFDFW

SEQ ID NO: 47217 - protein, 21 aa, Homo sapiens
CARLRKVGSTSDSLSHFFDYW

SEQ ID NO: 47218 - protein, 25 aa, Homo sapiens
CARLPPDPMARGSGVFLYYYYMDVW

SEQ ID NO: 47219 - protein, 21 aa, Homo sapiens
CAKDSRYYYESSGHTNYFDSW

SEQ ID NO: 47220 - protein, 16 aa, Homo sapiens
CAKSTLDLFGSHLDYW

SEQ ID NO: 47221 - protein, 21 aa, Homo sapiens
CARITYGGDAWTERLFAFDSW

SEQ ID NO: 47222 - protein, 19 aa, Homo sapiens
CARERWDTAMVSRNWVDYW

SEQ ID NO: 47223 - protein, 26 aa, Homo sapiens
CTAEPGNYYGSGTSESGTFYTYMDVW

SEQ ID NO: 47224 - protein, 24 aa, Homo sapiens
CATYFFGGFYDILTGPRRDYFDYW

SEQ ID NO: 47225 - protein, 19 aa, Homo sapiens
CAKDQTGWQLLSDWYFDLW

SEQ ID NO: 47226 - protein, 19 aa, Homo sapiens
CARRTFLSGTDGVDWFDLW

SEQ ID NO: 47227 - protein, 19 aa, Homo sapiens
CARTQGGDSGHRRGRFDPW

SEQ ID NO: 47228 - protein, 12 aa, Homo sapiens
CVRDHQWAFDIW

SEQ ID NO: 47229 - protein, 16 aa, Homo sapiens
CAKDRSPSIFREFDIW

SEQ ID NO: 47230 - protein, 20 aa, Homo sapiens
CARGPYYFDSSSYYPYFDYW

SEQ ID NO: 47231 - protein, 17 aa, Homo sapiens
CARVEHAGRTDGAFDIW

SEQ ID NO: 47232 - protein, 13 aa, Homo sapiens
CAWTDYTGERDYW

SEQ ID NO: 47233 - protein, 21 aa, Homo sapiens
CAIATQNCSGGPCRAWAFVYW

SEQ ID NO: 47234 - protein, 18 aa, Homo sapiens
CARDSMWELRVRYYMDVW

SEQ ID NO: 47235 - protein, 20 aa, Homo sapiens
CASDLIFNYYGSSKVASDIW

SEQ ID NO: 47236 - protein, 19 aa, Homo sapiens
CARDGYNYLRSRNWFFDLW

SEQ ID NO: 47237 - protein, 18 aa, Homo sapiens
CARTPIYGGNSFYAFDIW

SEQ ID NO: 47238 - protein, 23 aa, Homo sapiens
CARIRYYDFWSGYYKTCYYFDYW

SEQ ID NO: 47239 - protein, 17 aa, Homo sapiens
CARALLRRGQWLRYDYW

SEQ ID NO: 47240 - protein, 24 aa, Homo sapiens
CARLVRDDFWSGYHHDYYYGMDVW

SEQ ID NO: 47241 - protein, 19 aa, Homo sapiens
CAAEEMVFSATTYNWFDPW

SEQ ID NO: 47242 - protein, 23 aa, Homo sapiens
CARDQSSYDFWSGDLGGGGIDYW

SEQ ID NO: 47243 - protein, 17 aa, Homo sapiens
CAKDGYGSGSLHAFDIW

SEQ ID NO: 47244 - protein, 24 aa, Homo sapiens
CSKAALNMIVVVITSGYYYYMDVW

SEQ ID NO: 47245 - protein, 13 aa, Homo sapiens
CARGSNRYRGDYW

SEQ ID NO: 47246 - protein, 20 aa, Homo sapiens
CAKDWARLTMIIVIEYFQQW

SEQ ID NO: 47247 - protein, 20 aa, Homo sapiens
CATQRAPYSSGWYEYYFDYW

SEQ ID NO: 47248 - protein, 22 aa, Homo sapiens
CARDPGAQYSSSWYLGYYFDYW

SEQ ID NO: 47249 - protein, 25 aa, Homo sapiens
CARAAIVVVPAAIPLGYVVDWFDPW

SEQ ID NO: 47250 - protein, 18 aa, Homo sapiens
CARSKVRYSSGLYYFDYW

SEQ ID NO: 47251 - protein, 22 aa, Homo sapiens
CARDVPFTIFGVVTSHGWFDPW

SEQ ID NO: 47252 - protein, 15 aa, Homo sapiens
CARVSHNYGDYFDYW

SEQ ID NO: 47253 - protein, 23 aa, Homo sapiens
CARDLLYYHVNRGAEVTYPFDFW

SEQ ID NO: 47254 - protein, 21 aa, Homo sapiens
CARDIGSWFGELFTSGSFDYW

SEQ ID NO: 47255 - protein, 22 aa, Homo sapiens
CAKDESVGGTREGYYYYAMDVW

SEQ ID NO: 47256 - protein, 23 aa, Homo sapiens
CARVGEKTNDFWRGFPIYYMDVW

SEQ ID NO: 47257 - protein, 22 aa, Homo sapiens
CVLSGYDLKSRARYYYYGMDVW

SEQ ID NO: 47258 - protein, 19 aa, Homo sapiens
CAREPASLGGYSYGHVDYW

SEQ ID NO: 47259 - protein, 15 aa, Homo sapiens
CATAMSYLSNWFDPW

SEQ ID NO: 47260 - protein, 22 aa, Homo sapiens
CAANHRYYDSRGYYHVPGFDSW

SEQ ID NO: 47261 - protein, 18 aa, Homo sapiens
CTRSYDFWSGYPMGVDYW

SEQ ID NO: 47262 - protein, 16 aa, Homo sapiens
CAKDRVAGDPDCFDYW

SEQ ID NO: 47263 - protein, 15 aa, Homo sapiens
CARAVGWAARHFDYW

SEQ ID NO: 47264 - protein, 14 aa, Homo sapiens
CARARGYSYAIDYW

SEQ ID NO: 47265 - protein, 15 aa, Homo sapiens
CARAFYGFYWYFDLW

SEQ ID NO: 47266 - protein, 16 aa, Homo sapiens
CAKFAGTTGGGPFDYW

SEQ ID NO: 47267 - protein, 24 aa, Homo sapiens
CARIPPPYYYDSSGYPSGYYMDVW

SEQ ID NO: 47268 - protein, 21 aa, Homo sapiens
CTRDVFRIRYAESAHDAFDIW

SEQ ID NO: 47269 - protein, 16 aa, Homo sapiens
CARGEYSGYDYYFDYW

SEQ ID NO: 47270 - protein, 14 aa, Homo sapiens [sequence omitted]

SEQ ID NO: 47271 - protein, 16 aa, Homo sapiens
CTRGSWGDSLNLVDSW

SEQ ID NO: 47272 - protein, 28 aa, Homo sapiens
CARDSYYYDSSGYYYKPTYYYYYYMDVW

SEQ ID NO: 47273 - protein, 15 aa, Homo sapiens
CQVWISSTDHLYYVF

SEQ ID NO: 47274 - protein, 26 aa, Homo sapiens
CARVSYYGSGSYYNPLYYYYYGMDVW

SEQ ID NO: 47275 - protein, 20 aa, Homo sapiens
CARGVGWELSTYYYYYMDVW

SEQ ID NO: 47276 - protein, 16 aa, Homo sapiens
CTRGPDGYKHDAFDIW

SEQ ID NO: 47277 - protein, 20 aa, Homo sapiens
CAREFVDILTGYYNNAFDIW

SEQ ID NO: 47278 - protein, 16 aa, Homo sapiens
CAKDLFFFSGSYYEYW

SEQ ID NO: 47279 - protein, 22 aa, Homo sapiens
CARGGPITIFGVVIENYYMDVW

SEQ ID NO: 47280 - protein, 15 aa, Homo sapiens
CARNRGDYDDAFDIW

SEQ ID NO: 47281 - protein, 15 aa, Homo sapiens
CAISNRDDVDQFDYW

SEQ ID NO: 47282 - protein, 14 aa, Homo sapiens
CAKVNNGGNSFDYW

SEQ ID NO: 47283 - protein, 16 aa, Homo sapiens
CTRKEWLSLYGWFDPW

SEQ ID NO: 47284 - protein, 15 aa, Homo sapiens
CAYTEYGNYHLFEYW

SEQ ID NO: 47285 - protein, 25 aa, Homo sapiens
CAKCDLGSPVRRYYDWLSLYYFDQW

SEQ ID NO: 47286 - protein, 14 aa, Homo sapiens
CQSVDSFGLYPGIF

SEQ ID NO: 47287 - protein, 19 aa, Homo sapiens
CARDSVFGSGYFGDAFDIW

SEQ ID NO: 47288 - protein, 20 aa, Homo sapiens
CANGGFLSMIVVVIEYFHHW

SEQ ID NO: 47289 - protein, 21 aa, Homo sapiens
CARATSITMIVVVTLDAFDIW

SEQ ID NO: 47290 - protein, 23 aa, Homo sapiens
CAREAGITIFGVVMPQYWYFDLW

SEQ ID NO: 47291 - protein, 18 aa, Homo sapiens
CARDPDSAGDRGSVDDYW

SEQ ID NO: 47292 - protein, 22 aa, Homo sapiens
CALSIGAAGTVGTKYYYGMDVW

SEQ ID NO: 47293 - protein, 21 aa, Homo sapiens
CARHWRPIVVVTAIGHWFDPW

SEQ ID NO: 47294 - protein, 26 aa, Homo sapiens
CARDTLADNYESSGYIVYGKSWFDPW

SEQ ID NO: 47295 - protein, 21 aa, Homo sapiens
CAKGAPPQQLVRYYYYYMDVW

SEQ ID NO: 47296 - protein, 17 aa, Homo sapiens
CTRVWGSGSYYNPFDYW

SEQ ID NO: 47297 - protein, 15 aa, Homo sapiens
CARDATYYGSGIDYW

SEQ ID NO: 47298 - protein, 19 aa, Homo sapiens
CARGRRRWLQLEGYYFDYW

SEQ ID NO: 47299 - protein, 20 aa, Homo sapiens
CARPGAWSGYSFAPDAFDIW

SEQ ID NO: 47300 - protein, 16 aa, Homo sapiens
CARIQQQLSLDAFDIW

SEQ ID NO: 47301 - protein, 23 aa, Homo sapiens
CAKDERITIFGVVITRGGYFDLW

SEQ ID NO: 47302 - protein, 24 aa, Homo sapiens
CARDHLYSSSSRGTYYYYYGMDVW

SEQ ID NO: 47303 - protein, 15 aa, Homo sapiens
CARRVVAPRGYFDSW

SEQ ID NO: 47304 - protein, 17 aa, Homo sapiens
CAKDWGSSGWYNWFDTW

SEQ ID NO: 47305 - protein, 15 aa, Homo sapiens
CAKQSGGWRTKVDYW

SEQ ID NO: 47306 - protein, 24 aa, Homo sapiens
CARVGVFGDVMKRQPDYYYYMDVW

SEQ ID NO: 47307 - protein, 23 aa, Homo sapiens
CARVYSSGWGVRDYYYYYGMDVW

SEQ ID NO: 47308 - protein, 19 aa, Homo sapiens
CAKNRITIFGVVGDYMDVW

SEQ ID NO: 47309 - protein, 18 aa, Homo sapiens
CAKDFAWYYYDSSGYDYW

SEQ ID NO: 47310 - protein, 18 aa, Homo sapiens
CARDWYSSGWSRNWFDPW

SEQ ID NO: 47311 - protein, 20 aa, Homo sapiens
CARGHSSGWYSHYYYYMDVW

SEQ ID NO: 47312 - protein, 20 aa, Homo sapiens
CASHLVDTAMVTPYWYFDLW

SEQ ID NO: 47313 - protein, 23 aa, Homo sapiens
CARGYPFQIVLVVYAIGGYFDYW

SEQ ID NO: 47314 - protein, 19 aa, Homo sapiens
CARDRGYSGYGAYWYFDLW

SEQ ID NO: 47315 - protein, 14 aa, Homo sapiens
CARVRGYYEHFDYW

SEQ ID NO: 47316 - protein, 27 aa, Homo sapiens
CARHPLGGYDIVVVPAAIRPLNWFDPW

SEQ ID NO: 47317 - protein, 22 aa, Homo sapiens
CARHQRGGDYGGSAGLPPFDYW

SEQ ID NO: 47318 - protein, 16 aa, Homo sapiens
CAKEGGLAISNAFDIW

SEQ ID NO: 47319 - protein, 21 aa, Homo sapiens
CTTVHYYDSSGYYNLDAFDIW

SEQ ID NO: 47320 - protein, 15 aa, Homo sapiens
CAHKATWNYDAFDVW

SEQ ID NO: 47321 - protein, 16 aa, Homo sapiens
CARLSSTYYYEDFDYW

SEQ ID NO: 47322 - protein, 20 aa, Homo sapiens
CARDTSPSVVRGVIGWFDPW

SEQ ID NO: 47323 - protein, 26 aa, Homo sapiens
CAKGAPSGGLLVVVVAATKYDAFDIW

SEQ ID NO: 47324 - protein, 27 aa, Homo sapiens
CAKDQTYSQDCSSGACYYNYYDAMDVW

SEQ ID NO: 47325 - protein, 24 aa, Homo sapiens
CARDLSVWWLRGPLNYYYYGMDVW

SEQ ID NO: 47326 - protein, 26 aa, Homo sapiens
CARVRTPIDSSGYYFPNYYYYYMDVW

SEQ ID NO: 47327 - protein, 17 aa, Homo sapiens
CAKGVNNGSPYSAFEIW

SEQ ID NO: 47328 - protein, 18 aa, Homo sapiens
CARDRWEGSGSFLMGDYW

SEQ ID NO: 47329 - protein, 23 aa, Homo sapiens
CAKAYSGSYYTPYYYYYYGMDVW

SEQ ID NO: 47330 - protein, 18 aa, Homo sapiens
CARDLKLSYGDYGYFDLW

SEQ ID NO: 47331 - protein, 20 aa, Homo sapiens
CARGRLEYSSSFFDYYMDVW

SEQ ID NO: 47332 - protein, 23 aa, Homo sapiens
CARQLGATIVLVVYHPNNWFDPW

SEQ ID NO: 47333 - protein, 20 aa, Homo sapiens
CAKDLPIYDSVGYFDAFDIW

SEQ ID NO: 47334 - protein, 18 aa, Homo sapiens
CARIAMVRFYYYYGMDVW

SEQ ID NO: 47335 - protein, 19 aa, Homo sapiens
CARRSPGAPRNDPPHFDYW

SEQ ID NO: 47336 - protein, 22 aa, Homo sapiens
CARVMNVLRFLEEPYYYYMDVW

SEQ ID NO: 47337 - protein, 24 aa, Homo sapiens
CARGSSIAAAANWAYYYYYGMDVW

SEQ ID NO: 47338 - protein, 21 aa, Homo sapiens
CARIRDQNYYDSSGYQPFDYW

SEQ ID NO: 47339 - protein, 18 aa, Homo sapiens
CARDGTISGVVISPLDYW

SEQ ID NO: 47340 - protein, 21 aa, Homo sapiens
CARRSFLNYDFWSGTHAFDIW

SEQ ID NO: 47341 - protein, 13 aa, Homo sapiens
CQSTDTSGRYYVF

SEQ ID NO: 47342 - protein, 15 aa, Homo sapiens
CAHTAAVAPGAFDPW

SEQ ID NO: 47343 - protein, 18 aa, Homo sapiens
CARDSPRGSQGDNWFDPW

SEQ ID NO: 47344 - protein, 24 aa, Homo sapiens
CAKDGRAGGGLYSGYDSNDAFDIW

SEQ ID NO: 47345 - protein, 11 aa, Homo sapiens
CLTWDSDTAIF

SEQ ID NO: 47346 - protein, 14 aa, Homo sapiens
CARSIIIVAPLDYW

SEQ ID NO: 47347 - protein, 14 aa, Homo sapiens
CAKDFAHYYYFDYW

SEQ ID NO: 47348 - protein, 25 aa, Homo sapiens
CARDKGWTYYDSSGYSVPDDAFDIW

SEQ ID NO: 47349 - protein, 15 aa, Homo sapiens
CRAIAVAATDHFDYW

SEQ ID NO: 47350 - protein, 18 aa, Homo sapiens
CARRTGDLVLGRGYFDLW

SEQ ID NO: 47351 - protein, 16 aa, Homo sapiens
CARGPAAGTSGAFDIW

SEQ ID NO: 47352 - protein, 18 aa, Homo sapiens
CAREGDHYDYVWGSFDYW

SEQ ID NO: 47353 - protein, 19 aa, Homo sapiens
CAKDRQLVHLVIYNWFDPW

SEQ ID NO: 47354 - protein, 18 aa, Homo sapiens
CARVGYSSSHRYWYFDLW

SEQ ID NO: 47355 - protein, 16 aa, Homo sapiens
CARRYFSSSWDVFDMW

SEQ ID NO: 47356 - protein, 28 aa, Homo sapiens
CARHGPWPTGLITIFGVVPRALDAFDIW

SEQ ID NO: 47357 - protein, 13 aa, Homo sapiens
CQVWSSSGDHGLF

SEQ ID NO: 47358 - protein, 16 aa, Homo sapiens
CTTGGSVAGLAPVDYW

SEQ ID NO: 47359 - protein, 18 aa, Homo sapiens
CARAVAVAGTGDDWFDPW

SEQ ID NO: 47360 - protein, 22 aa, Homo sapiens
CARGQGGYRYGISYYYYSMDVW

SEQ ID NO: 47361 - protein, 23 aa, Homo sapiens
CARDMRRRDDILTGSHSPWFDPW

SEQ ID NO: 47362 - protein, 21 aa, Homo sapiens
CARVGWELLPPYYYYYGMDVW

SEQ ID NO: 47363 - protein, 17 aa, Homo sapiens
CAKAPSPRGTTVNFDYW

SEQ ID NO: 47364 - protein, 16 aa, Homo sapiens
CARHYNYGDYDGIDYW

SEQ ID NO: 47365 - protein, 18 aa, Homo sapiens
CARNNYDFWSGHFYFDYW

SEQ ID NO: 47366 - protein, 13 aa, Homo sapiens
CTKDGGGWSFDHW

SEQ ID NO: 47367 - protein, 19 aa, Homo sapiens
CAKDLRSTYNSGWITFDCW

SEQ ID NO: 47368 - protein, 15 aa, Homo sapiens
CARIFNLNERYFDSW

SEQ ID NO: 47369 - protein, 20 aa, Homo sapiens
CARDGMADYADSGDPIFDYW

SEQ ID NO: 47370 - protein, 18 aa, Homo sapiens
CAREEWELLGYYYYMDVW

SEQ ID NO: 47371 - protein, 21 aa, Homo sapiens
CAHLLRNEESIAVAGSSFDYW

SEQ ID NO: 47372 - protein, 20 aa, Homo sapiens
CARLVRYCGGSGCYSRFDSW

SEQ ID NO: 47373 - protein, 16 aa, Homo sapiens
CARHEQLLLTYYFDFW

SEQ ID NO: 47374 - protein, 18 aa, Homo sapiens
CVPWGGDPRDYYYGMDVW

SEQ ID NO: 47375 - protein, 26 aa, Homo sapiens
CARDQSEAYYDILTGYSPNINWFDPW

SEQ ID NO: 47376 - protein, 18 aa, Homo sapiens
CAHRRADYGDHAFWFDPW

SEQ ID NO: 47377 - protein, 17 aa, Homo sapiens
CARDASSTSPNYYFDYW

SEQ ID NO: 47378 - protein, 16 aa, Homo sapiens
CAKDIWGFDGGNFDYW

SEQ ID NO: 47379 - protein, 16 aa, Homo sapiens
CARGVSHDIEDAFDIW

SEQ ID NO: 47380 - protein, 21 aa, Homo sapiens
CAKVPSAAGEHHYYYYGMDVW

SEQ ID NO: 47381 - protein, 12 aa, Homo sapiens
CQSAGSRGTLVF

SEQ ID NO: 47382 - protein, 18 aa, Homo sapiens
CAKDYLAFNRVTGPGDYW

SEQ ID NO: 47383 - protein, 23 aa, Homo sapiens
CAKAVGYCSGGSCFDYYYGMDVW

SEQ ID NO: 47384 - protein, 18 aa, Homo sapiens
CARDYHDSSGYDHGFDPW

SEQ ID NO: 47385 - protein, 23 aa, Homo sapiens
CARGPYYDFWSGYYQLAHWFDPW

SEQ ID NO: 47386 - protein, 30 aa, Homo sapiens
CAKDSKYYDILTGYFIQNTQSYYYYGMDVW

SEQ ID NO: 47387 - protein, 21 aa, Homo sapiens
CAREEGNYYDSSGYLNWFDPW

SEQ ID NO: 47388 - protein, 23 aa, Homo sapiens
CATNIYCNSPTCYARSINWFDPW

SEQ ID NO: 47389 - protein, 17 aa, Homo sapiens
CARVGQQLAGGWYFDLW

SEQ ID NO: 47390 - protein, 19 aa, Homo sapiens
CAKAYDFWSGYWNNAFDIW

SEQ ID NO: 47391 - protein, 20 aa, Homo sapiens
CARDVRITIFGEYYYYMDVW

SEQ ID NO: 47392 - protein, 18 aa, Homo sapiens
CARAVITMIEDRSAFDIW

SEQ ID NO: 47393 - protein, 12 aa, Homo sapiens
CTSGSYYWFDPW

SEQ ID NO: 47394 - protein, 17 aa, Homo sapiens
CAKGREWESTPGAFDIW

SEQ ID NO: 47395 - protein, 16 aa, Homo sapiens
CARESLHGFSRPLDYW

SEQ ID NO: 47396 - protein, 19 aa, Homo sapiens
CARVGEWELLNGVWAFDIW

SEQ ID NO: 47397 - protein, 19 aa, Homo sapiens
CAKNRARAAAGPGGGFDYW

SEQ ID NO: 47398 - protein, 23 aa, Homo sapiens
CTRGSRPVPKRQHNYYYYDMDVW

SEQ ID NO: 47399 - protein, 21 aa, Homo sapiens
CARDWSVYYDSSGYYGGPDYW

SEQ ID NO: 47400 - protein, 14 aa, Homo sapiens
CARGFGNDNWFDPW

SEQ ID NO: 47401 - protein, 23 aa, Homo sapiens
CARVDGRYCRNNNCYTGGWFDPW

SEQ ID NO: 47402 - protein, 21 aa, Homo sapiens
CAREYSGYDYVLSYYYYMDVW

SEQ ID NO: 47403 - protein, 22 aa, Homo sapiens
CARGEGRLRYDFWSGLTRFDYW

SEQ ID NO: 47404 - protein, 18 aa, Homo sapiens
CASSSTSCYFVCDWFDPW

SEQ ID NO: 47405 - protein, 13 aa, Homo sapiens
CAKGAAGLPFDYW

SEQ ID NO: 47406 - protein, 19 aa, Homo sapiens
CARGSHDFWSGYNYYFDYW

SEQ ID NO: 47407 - protein, 19 aa, Homo sapiens
CARSYYDILTGSLEPFDYW

SEQ ID NO: 47408 - protein, 25 aa, Homo sapiens
CAKDVLPPHYDSSGYYYEGIGFDYW

SEQ ID NO: 47409 - protein, 16 aa, Homo sapiens
CAKVGYYDSSGYYAYW

SEQ ID NO: 47410 - protein, 20 aa, Homo sapiens
CATGNPSLLFGPWGRGFDPW

SEQ ID NO: 47411 - protein, 21 aa, Homo sapiens
CARDRLAGFTGFYYYYYMDVW

SEQ ID NO: 47412 - protein, 16 aa, Homo sapiens
CATGPATVTTGWFDPW

SEQ ID NO: 47413 - protein, 21 aa, Homo sapiens
CAKAIYYDSSGYYGAGAFDIW

SEQ ID NO: 47414 - protein, 15 aa, Homo sapiens
CARDGLLSGWYFDYW

SEQ ID NO: 47415 - protein, 17 aa, Homo sapiens
CTAHDSSGYYWADFDYW

SEQ ID NO: 47416 - protein, 25 aa, Homo sapiens
CARLPYYDFWSGHGPDYYYYYMDVW

SEQ ID NO: 47417 - protein, 15 aa, Homo sapiens
CARATDSSGYSFSYW

SEQ ID NO: 47418 - protein, 19 aa, Homo sapiens
CVREDVLVPGTALNWFDTW

SEQ ID NO: 47419 - protein, 17 aa, Homo sapiens
CAKDSYPSIAVDYFDYW

SEQ ID NO: 47420 - protein, 24 aa, Homo sapiens
CARGDFKSRMIVVVILRSYYFDYW

SEQ ID NO: 47421 - protein, 19 aa, Homo sapiens
CAAALSDSSGYYHNWFDPW

SEQ ID NO: 47422 - protein, 19 aa, Homo sapiens
CAKDIKIRTIFGVGSFDPW

SEQ ID NO: 47423 - protein, 21 aa, Homo sapiens
CATRVGIYSSGWWGDDAFDIW

SEQ ID NO: 47424 - protein, 19 aa, Homo sapiens
CALSAHPRFGDNLFPYDYW

SEQ ID NO: 47425 - protein, 23 aa, Homo sapiens
CATLGMDCSSTSCYEGRDYFDYW

SEQ ID NO: 47426 - protein, 25 aa, Homo sapiens
CTTGPHFSLFESVSGTYREDVFDVW

SEQ ID NO: 47427 - protein, 16 aa, Homo sapiens
CARDLGVVQSSNFDYW

SEQ ID NO: 47428 - protein, 17 aa, Homo sapiens
CARDVPDIIEVAGFDYW

SEQ ID NO: 47429 - protein, 17 aa, Homo sapiens
CARIKGPPVTSPVLDYW

SEQ ID NO: 47430 - protein, 21 aa, Homo sapiens
CAHTVAQQWLVFSHLLWFDPW

SEQ ID NO: 47431 - protein, 19 aa, Homo sapiens
CATHQIRYFDWSKNYFDYW

SEQ ID NO: 47432 - protein, 17 aa, Homo sapiens
CTRGIPEYSTFVRLDYW

SEQ ID NO: 47433 - protein, 15 aa, Homo sapiens
CASLGPASSLNFDYW

SEQ ID NO: 47434 - protein, 24 aa, Homo sapiens
CAKAGAKYFDFWTGSYEGFYFDYW

SEQ ID NO: 47435 - protein, 12 aa, Homo sapiens
CVKDRSSVFDIW

SEQ ID NO: 47436 - protein, 21 aa, Homo sapiens
CARGDQYSYGPYYYYYYMDVW

SEQ ID NO: 47437 - protein, 16 aa, Homo sapiens
CAKDKVERPYWYFDLW

SEQ ID NO: 47438 - protein, 22 aa, Homo sapiens
CARCGGGALDILTGYRWWFDPW

SEQ ID NO: 47439 - protein, 17 aa, Homo sapiens
CARDIRFSRLGDAFDIW

SEQ ID NO: 47440 - protein, 22 aa, Homo sapiens
CATSSPDILTGYYGGSYYFDYW

SEQ ID NO: 47441 - protein, 20 aa, Homo sapiens
CAKDMGFLEWYNYYYGMDVW

SEQ ID NO: 47442 - protein, 21 aa, Homo sapiens
CAKARLQYANGGPLGNWFDPW

SEQ ID NO: 47443 - protein, 15 aa, Homo sapiens
CTTYYYHSDGYADYW

SEQ ID NO: 47444 - protein, 22 aa, Homo sapiens
CARHYYDYVWGSYREEIPLDYW

SEQ ID NO: 47445 - protein, 17 aa, Homo sapiens
CATASPLAVAANWFDPW

SEQ ID NO: 47446 - protein, 17 aa, Homo sapiens
CARGGDDYSNSWYMDVW

SEQ ID NO: 47447 - protein, 22 aa, Homo sapiens
CATNTVGGSYYFSLTQYYFDYW

SEQ ID NO: 47448 - protein, 13 aa, Homo sapiens
CASLRRWDPRDYW

SEQ ID NO: 47449 - protein, 18 aa, Homo sapiens
CARGVAAAGRRSWWFDPW

SEQ ID NO: 47450 - protein, 17 aa, Homo sapiens
CARDGYSSNWAEYFQHW

SEQ ID NO: 47451 - protein, 20 aa, Homo sapiens
CAREGAYSSGWYPQDAFDIW

SEQ ID NO: 47452 - protein, 19 aa, Homo sapiens
CTAQFCTSTSCYGDAFDIW

SEQ ID NO: 47453 - protein, 20 aa, Homo sapiens
CARRPQYCSSTSCLGWFDPW

SEQ ID NO: 47454 - protein, 20 aa, Homo sapiens
CARTVVVVVAATQVKEFDYW

SEQ ID NO: 47455 - protein, 11 aa, Homo sapiens
CMQGVLWPVTF

SEQ ID NO: 47456 - protein, 22 aa, Homo sapiens
CAKDSQARWLQLNYYYYYMDVW

SEQ ID NO: 47457 - protein, 21 aa, Homo sapiens
CARQRRTIFGVVIRMWYFDLW

SEQ ID NO: 47458 - protein, 11 aa, Homo sapiens [sequence omitted]

SEQ ID NO: 47459 - protein, 21 aa, Homo sapiens
CARADAWTMTTVTTPGYFDYW

SEQ ID NO: 47460 - protein, 12 aa, Homo sapiens
CARLSVPTADYW

SEQ ID NO: 47461 - protein, 20 aa, Homo sapiens
CARGPAHGDYSRFRYRFDYW

SEQ ID NO: 47462 - protein, 16 aa, Homo sapiens
CAKSYSGSYFSAFDIW

SEQ ID NO: 47463 - protein, 15 aa, Homo sapiens
CAKAGRDLDMFFDSW

SEQ ID NO: 47464 - protein, 17 aa, Homo sapiens
CARAVATVARPYYFDHW

SEQ ID NO: 47465 - protein, 21 aa, Homo sapiens
CARAFRYAITIFGVVTWFDPW

SEQ ID NO: 47466 - protein, 19 aa, Homo sapiens
CAKAEKRVTLYGGFAFDFW

SEQ ID NO: 47467 - protein, 23 aa, Homo sapiens
CTTGRHEVDTAMGTYYYYYMDVW

SEQ ID NO: 47468 - protein, 28 aa, Homo sapiens
CTRDRSSLLWMDTAMVYRPAPTRGIDYW

SEQ ID NO: 47469 - protein, 19 aa, Homo sapiens
CASDNCGGDCYSAGAFDIW

SEQ ID NO: 47470 - protein, 20 aa, Homo sapiens
CATSTRYSGYSYGAKSFEYW

SEQ ID NO: 47471 - protein, 18 aa, Homo sapiens
CARAMGDATTYGNWLDPW

SEQ ID NO: 47472 - protein, 20 aa, Homo sapiens
CARLRGFIFGVVIEYYFDYW

SEQ ID NO: 47473 - protein, 21 aa, Homo sapiens
CARRHMSITIFGVVNDAFDIW

SEQ ID NO: 47474 - protein, 22 aa, Homo sapiens
CAHRRRITMIKSSGPYDAFDIW

SEQ ID NO: 47475 - protein, 21 aa, Homo sapiens
CARGDAYWLGEGGGSYYFDYW

SEQ ID NO: 47476 - protein, 18 aa, Homo sapiens
CVKAHDYGGGDWGDFDTW

SEQ ID NO: 47477 - protein, 25 aa, Homo sapiens
CAREERITIFGVVISDYYYYYMDVW

SEQ ID NO: 47478 - protein, 25 aa, Homo sapiens
CARHAYDFWSGYIRGIYYYYGMDVW

SEQ ID NO: 47479 - protein, 16 aa, Homo sapiens
CARDLGVGVATIFDYW

SEQ ID NO: 47480 - protein, 21 aa, Homo sapiens
CARGGFDYCGGDCHDWYFDLW

SEQ ID NO: 47481 - protein, 18 aa, Homo sapiens
CARSPYFLTYSWSHFDYW

SEQ ID NO: 47482 - protein, 13 aa, Homo sapiens
CQQYVGSPPEYTF

SEQ ID NO: 47483 - protein, 20 aa, Homo sapiens
CTTDPRATIFGVVIISHDYW

SEQ ID NO: 47484 - protein, 13 aa, Homo sapiens
CARVTIAVALDYW

SEQ ID NO: 47485 - protein, 24 aa, Homo sapiens
CARHPLSSITIFGVVKGDDAFDIW

SEQ ID NO: 47486 - protein, 24 aa, Homo sapiens
CAREFVTMVRGVIKWHYYYGMDVW

SEQ ID NO: 47487 - protein, 17 aa, Homo sapiens
CAREGYTYGTDYYFDNW

SEQ ID NO: 47488 - protein, 21 aa, Homo sapiens
CAKGAWYSSGWYVGSDYMDVW

SEQ ID NO: 47489 - protein, 27 aa, Homo sapiens
CARVTDRAEYFDWLFHSEAHPGYFDYW

SEQ ID NO: 47490 - protein, 17 aa, Homo sapiens
CARGVGELFLGNWFDPW

SEQ ID NO: 47491 - protein, 17 aa, Homo sapiens
CGKDSFWQNNWNFADYW

SEQ ID NO: 47492 - protein, 21 aa, Homo sapiens
CARRLRTNCGGDCSGGSFEYW

SEQ ID NO: 47493 - protein, 15 aa, Homo sapiens
CAKEWWDSSGYPDYW

SEQ ID NO: 47494 - protein, 26 aa, Homo sapiens
CARDVEVRNYYDSSGYYHSGFPLDYW

SEQ ID NO: 47495 - protein, 19 aa, Homo sapiens
CTTLHYYDSSGYFPNNDYW

SEQ ID NO: 47496 - protein, 18 aa, Homo sapiens
CARQGAIFGVALNWFDPW

SEQ ID NO: 47497 - protein, 16 aa, Homo sapiens
CSRASEGDYGDYMDVW

SEQ ID NO: 47498 - protein, 20 aa, Homo sapiens
CASAGLSFDILTGYYRLDYW

SEQ ID NO: 47499 - protein, 15 aa, Homo sapiens
CAKRDGYNPPAFDIW

SEQ ID NO: 47500 - protein, 25 aa, Homo sapiens
CARDGRITIFGVASIPYYYYGMDVW

SEQ ID NO: 47501 - protein, 18 aa, Homo sapiens
CASHMTTVTTSHWYFDLW

SEQ ID NO: 47502 - protein, 15 aa, Homo sapiens
CANLQLGYYYGMDVW

SEQ ID NO: 47503 - protein, 20 aa, Homo sapiens
CAKGSSVLRFLEWLYPFDYW

SEQ ID NO: 47504 - protein, 19 aa, Homo sapiens
CARTYYYDGSGYHDAFDVW

SEQ ID NO: 47505 - protein, 22 aa, Homo sapiens
CARVRRDCSGGSCLKFNWLDPW

SEQ ID NO: 47506 - protein, 21 aa, Homo sapiens
CAKTPNYYDSSGTANRAYDYW

SEQ ID NO: 47507 - protein, 15 aa, Homo sapiens
CARDKFWTDWYFDLW

SEQ ID NO: 47508 - protein, 15 aa, Homo sapiens
CARRTPGGTYPFDYW

SEQ ID NO: 47509 - protein, 11 aa, Homo sapiens
CQQYFSRPIAF

SEQ ID NO: 47510 - protein, 31 aa, Homo sapiens
CARDRRPFLDAYYDFWSGYSLSYYYYGMDVW

SEQ ID NO: 47511 - protein, 23 aa, Homo sapiens
CARALFSDVMVRGPIRGLPFDYW

SEQ ID NO: 47512 - protein, 14 aa, Homo sapiens
CARDLYYYVPFDYW

SEQ ID NO: 47513 - protein, 13 aa, Homo sapiens
CHSRDYSGNHWDF

SEQ ID NO: 47514 - protein, 23 aa, Homo sapiens
CARARGLEMATIRDYYYYYMDVW

SEQ ID NO: 47515 - protein, 20 aa, Homo sapiens
CAKDKSYDSSGYYHNAFDIW

SEQ ID NO: 47516 - protein, 18 aa, Homo sapiens
CARPHYDSSGRTRYFDYW

SEQ ID NO: 47517 - protein, 18 aa, Homo sapiens
CAKGASTNPPGTRYFEDW

SEQ ID NO: 47518 - protein, 19 aa, Homo sapiens
CARPLGFGGVIARDAFDIW

SEQ ID NO: 47519 - protein, 24 aa, Homo sapiens
CARDGALAIFGVVTNYYYYGMDVW

SEQ ID NO: 47520 - protein, 17 aa, Homo sapiens
CATGPPVVGATGWFDPW

SEQ ID NO: 47521 - protein, 15 aa, Homo sapiens
CTTDGYGDNDPADYW

SEQ ID NO: 47522 - protein, 23 aa, Homo sapiens
CATGRVVFGDYVSSYYYYGMDVW

SEQ ID NO: 47523 - protein, 19 aa, Homo sapiens
CARHAGGAVAGPVRHFDSW

SEQ ID NO: 47524 - protein, 22 aa, Homo sapiens
CARARIVGATPFRVGQYYFDSW

SEQ ID NO: 47525 - protein, 17 aa, Homo sapiens
CARDTGIVVVTGYFDLW

SEQ ID NO: 47526 - protein, 25 aa, Homo sapiens
CARERAGDYDFWSGSTYYYYYMDVW

SEQ ID NO: 47527 - protein, 21 aa, Homo sapiens
CARGATTYYDILTGYLHADYW

SEQ ID NO: 47528 - protein, 14 aa, Homo sapiens
CAKECSSTSCSDYW

SEQ ID NO: 47529 - protein, 23 aa, Homo sapiens
CARHRTYYDILTRSYYYYGMDVW

SEQ ID NO: 47530 - protein, 19 aa, Homo sapiens
CAREGELTSTAMVTGFDYW

SEQ ID NO: 47531 - protein, 17 aa, Homo sapiens
CARDQRWFGELYAFDIW

SEQ ID NO: 47532 - protein, 18 aa, Homo sapiens
CAKGSPYWSGYYGGFDYW

SEQ ID NO: 47533 - protein, 20 aa, Homo sapiens
CAKDPGSGYSRGWSYYFEDW

SEQ ID NO: 47534 - protein, 20 aa, Homo sapiens
CASVPAAIPAYYYYYGMDVW

SEQ ID NO: 47535 - protein, 20 aa, Homo sapiens
CAHRRYCTGGVCYSGYFDYW

SEQ ID NO: 47536 - protein, 32 aa, Homo sapiens
CARDALYYYDSSGYYGASTGRIYYYYYGMDVW

SEQ ID NO: 47537 - protein, 14 aa, Homo sapiens
CAKVPPTAYGYDYW

SEQ ID NO: 47538 - protein, 19 aa, Homo sapiens
CAKDPPWGSVAGTGYFDYW

SEQ ID NO: 47539 - protein, 17 aa, Homo sapiens
CARDGAVMTALEYFQYW

SEQ ID NO: 47540 - protein, 16 aa, Homo sapiens
CARPVWGSYRSQFDPW

SEQ ID NO: 47541 - protein, 16 aa, Homo sapiens
CASTRRHYYNDPLDYW

SEQ ID NO: 47542 - protein, 14 aa, Homo sapiens
CYSTDSSSYHRGVF

SEQ ID NO: 47543 - protein, 22 aa, Homo sapiens
CARGVAITIFAVVNPHYYFHYW

SEQ ID NO: 47544 - protein, 20 aa, Homo sapiens
CARDSGSYFGHTALNWFDPW

SEQ ID NO: 47545 - protein, 23 aa, Homo sapiens
CARGRYCSGGSCYWVWSNWFDPW

SEQ ID NO: 47546 - protein, 18 aa, Homo sapiens
CARAPLRYFDWSYPFDPW

SEQ ID NO: 47547 - protein, 13 aa, Homo sapiens
CQVWDSDTDQVFF

SEQ ID NO: 47548 - protein, 14 aa, Homo sapiens
CAKLPVADTPKDYW

SEQ ID NO: 47549 - protein, 18 aa, Homo sapiens
CAKIAMYNRPGTYLWDYW

SEQ ID NO: 47550 - protein, 24 aa, Homo sapiens
CATLHHYDFWSGSRILYYYYMDVW

SEQ ID NO: 47551 - protein, 14 aa, Homo sapiens
CAFRRNYVGAFDPW

SEQ ID NO: 47552 - protein, 25 aa, Homo sapiens
CARDIKIVEMATNGYYYYYYGMDVW

SEQ ID NO: 47553 - protein, 19 aa, Homo sapiens
CATIPMFEGQWLGDAFDIW

SEQ ID NO: 47554 - protein, 9 aa, Homo sapiens
CATSYMDVW

SEQ ID NO: 47555 - protein, 23 aa, Homo sapiens
CARGDSGYDPVGGLGYYYYMDVW

SEQ ID NO: 47556 - protein, 18 aa, Homo sapiens
CARSHFTMIVVLDAFDIW

SEQ ID NO: 47557 - protein, 22 aa, Homo sapiens
CAKDLGGITIFGVVIDDAFDIW

SEQ ID NO: 47558 - protein, 18 aa, Homo sapiens
CARDRDWGYSDDNWFDPW

SEQ ID NO: 47559 - protein, 17 aa, Homo sapiens
CARGTSGSYWSTAFDIW

SEQ ID NO: 47560 - protein, 25 aa, Homo sapiens
CARDRLVLDYYDSSGYYYSDAFDIW

SEQ ID NO: 47561 - protein, 20 aa, Homo sapiens
CARGGVTTVVTIIPYAFDIW

SEQ ID NO: 47562 - protein, 15 aa, Homo sapiens
CASFSLYSSCWFDPW

SEQ ID NO: 47563 - protein, 21 aa, Homo sapiens
CARAPGVQSPAVDYYYGMDVW

SEQ ID NO: 47564 - protein, 19 aa, Homo sapiens
CARDRGSSGYQGPYYMDVW

SEQ ID NO: 47565 - protein, 15 aa, Homo sapiens
CAREGIRGSGSYDYW

SEQ ID NO: 47566 - protein, 11 aa, Homo sapiens [sequence omitted]

SEQ ID NO: 47567 - protein, 16 aa, Homo sapiens
CAREGLYDISPYVDSW

SEQ ID NO: 47568 - protein, 14 aa, Homo sapiens
CARQIVIYTLFDYW

SEQ ID NO: 47569 - protein, 19 aa, Homo sapiens
CARADSSGWPTPTHYFDYW

SEQ ID NO: 47570 - protein, 27 aa, Homo sapiens
CAREPFPYYYDSSGYRIEYYYYGMDVW

SEQ ID NO: 47571 - protein, 18 aa, Homo sapiens
CAHRHGTGYYYGAYFDYW

SEQ ID NO: 47572 - protein, 19 aa, Homo sapiens
CARPKSYYYDSGAYPLDYW

SEQ ID NO: 47573 - protein, 18 aa, Homo sapiens
CAREEDVYPSPREGFDCW

SEQ ID NO: 47574 - protein, 16 aa, Homo sapiens
CARDGATYSPGAFDIW

SEQ ID NO: 47575 - protein, 19 aa, Homo sapiens
CARLQQWLDYYYYYGMDVW

SEQ ID NO: 47576 - protein, 16 aa, Homo sapiens
CAKDRDYTGYETHDYW

SEQ ID NO: 47577 - protein, 20 aa, Homo sapiens
CTTSAIPLNYYDSSYYFDYW

SEQ ID NO: 47578 - protein, 18 aa, Homo sapiens
CARVGGYDYGDQYYFNYW

SEQ ID NO: 47579 - protein, 16 aa, Homo sapiens
CARRTAPRPRGYFDYW

SEQ ID NO: 47580 - protein, 23 aa, Homo sapiens
CARGIVVVPAAIGGDYYYGMDVW

SEQ ID NO: 47581 - protein, 21 aa, Homo sapiens
CARGHVWSGYYPAYYYGMDVW

SEQ ID NO: 47582 - protein, 20 aa, Homo sapiens
CVREPEYNFDDSAIAGFDPW

SEQ ID NO: 47583 - protein, 15 aa, Homo sapiens
CARGAGSGWPHLDYW

SEQ ID NO: 47584 - protein, 21 aa, Homo sapiens
CTGGFDDFWSGSPEPDAFDIW

SEQ ID NO: 47585 - protein, 19 aa, Homo sapiens
CARGSVVPAAIPGIYFDYW

SEQ ID NO: 47586 - protein, 18 aa, Homo sapiens
CARDPSGHESGSPRFDPW

SEQ ID NO: 47587 - protein, 22 aa, Homo sapiens
CARGLFAYYDILTGYYGDFCYW

SEQ ID NO: 47588 - protein, 18 aa, Homo sapiens
CAKGYRAYQLPYNWFDPW

SEQ ID NO: 47589 - protein, 14 aa, Homo sapiens
CAFKPYSSSSPDYW

SEQ ID NO: 47590 - protein, 24 aa, Homo sapiens
CAHIRPKNYDILTGYYWPYYFDYW

SEQ ID NO: 47591 - protein, 24 aa, Homo sapiens
CTTEGIRAVAGTLLPLYYYYMDVW

SEQ ID NO: 47592 - protein, 27 aa, Homo sapiens
CTTDGLYCSSTSCYSPYYYYYYGMDVW

SEQ ID NO: 47593 - protein, 24 aa, Homo sapiens
CARGKRSMIVVVITPYYYYGMDVW

SEQ ID NO: 47594 - protein, 17 aa, Homo sapiens
CARASSLNGDYVVVDYW

SEQ ID NO: 47595 - protein, 16 aa, Homo sapiens
CAHRRAVVTPAWFDPW

SEQ ID NO: 47596 - protein, 17 aa, Homo sapiens
CARTQLRFLEWLPFDYW

SEQ ID NO: 47597 - protein, 17 aa, Homo sapiens
CAKVSGAYYNPHYFDSW

SEQ ID NO: 47598 - protein, 16 aa, Homo sapiens
CAKDIIRFSHDAFDIW

SEQ ID NO: 47599 - protein, 16 aa, Homo sapiens
CAREGVYGDYWWFDPW

SEQ ID NO: 47600 - protein, 21 aa, Homo sapiens
CARQARGYNYGYVAGWYFDLW

SEQ ID NO: 47601 - protein, 20 aa, Homo sapiens
CAAQGPDCSGGSCGPFFDYW

SEQ ID NO: 47602 - protein, 13 aa, Homo sapiens
CARGGAFYGYDYW

SEQ ID NO: 47603 - protein, 18 aa, Homo sapiens
CAKDIWGSGLVRGYFDYW

SEQ ID NO: 47604 - protein, 16 aa, Homo sapiens
CAKDLSVIQLWVFDYW

SEQ ID NO: 47605 - protein, 15 aa, Homo sapiens
CASGTNWSSYHFDPW

SEQ ID NO: 47606 - protein, 26 aa, Homo sapiens
CARSVNPNSDYIWGAYRFKGDWFDPW

SEQ ID NO: 47607 - protein, 17 aa, Homo sapiens
CAKDSQPDYHYSYMDVW

SEQ ID NO: 47608 - protein, 23 aa, Homo sapiens
CARPPYCSSTSCHDAGGHYFDYW

SEQ ID NO: 47609 - protein, 22 aa, Homo sapiens
CARDCSGGTCKTGGGIDAFDVW

SEQ ID NO: 47610 - protein, 16 aa, Homo sapiens
CAGEHYDSSGNSLDYW

SEQ ID NO: 47611 - protein, 19 aa, Homo sapiens
CARDGPYSTSGYVNWFDSW

SEQ ID NO: 47612 - protein, 22 aa, Homo sapiens
CARVLKYCSSTSCHYYYGMDVW

SEQ ID NO: 47613 - protein, 14 aa, Homo sapiens
CQSADSRHSYRVLF

SEQ ID NO: 47614 - protein, 19 aa, Homo sapiens
CAKEDCSGDNCYLDAFDIW

SEQ ID NO: 47615 - protein, 22 aa, Homo sapiens
CAKGGGPYCSSTSCYPSYFDYW

SEQ ID NO: 47616 - protein, 21 aa, Homo sapiens
CARAGREQWLVMWPSSWFDPW

SEQ ID NO: 47617 - protein, 17 aa, Homo sapiens
CARDLSLAVAAPEGDYW

SEQ ID NO: 47618 - protein, 19 aa, Homo sapiens
CARSAPEWELRYRYYFDYW

SEQ ID NO: 47619 - protein, 30 aa, Homo sapiens
CARDCGPPNGDLNLEWLSLGAYYYYYMDVW

SEQ ID NO: 47620 - protein, 23 aa, Homo sapiens
CARESRGYYDSSGYYYVGYFQHW

SEQ ID NO: 47621 - protein, 14 aa, Homo sapiens
CAGGSWYWVAFDIW

SEQ ID NO: 47622 - protein, 19 aa, Homo sapiens
CARDVGYSGYGSTHYFDYW

SEQ ID NO: 47623 - protein, 17 aa, Homo sapiens
CAHRGNFGDYLRYFDYW

SEQ ID NO: 47624 - protein, 14 aa, Homo sapiens
CAHIMEQRGDFDYW

SEQ ID NO: 47625 - protein, 22 aa, Homo sapiens
CAREQEDYCSGGSCYSTGFGYW

SEQ ID NO: 47626 - protein, 13 aa, Homo sapiens
CQQYNNWLQGLTF

SEQ ID NO: 47627 - protein, 17 aa, Homo sapiens
CATGPPIQLWKNWFDPW

SEQ ID NO: 47628 - protein, 17 aa, Homo sapiens
CARDRNRLAYKDAFDIW

SEQ ID NO: 47629 - protein, 18 aa, Homo sapiens
CARGQGGSGSYRGSFDYW

SEQ ID NO: 47630 - protein, 20 aa, Homo sapiens
CAHRRVELLWFGIPSYFDYW

SEQ ID NO: 47631 - protein, 19 aa, Homo sapiens
CARGKRYDFWGTLHYFDYW

SEQ ID NO: 47632 - protein, 22 aa, Homo sapiens
CATDTALPGYYNGTVYNWFDPW

SEQ ID NO: 47633 - protein, 16 aa, Homo sapiens
CQSYDSSLSGRGDWVF

SEQ ID NO: 47634 - protein, 25 aa, Homo sapiens
CARHEVQVHPDGIPGISAAGGFDFW

SEQ ID NO: 47635 - protein, 20 aa, Homo sapiens
CARGGTIFGVVITYWYFDLW

SEQ ID NO: 47636 - protein, 27 aa, Homo sapiens
CARAGVDKSYYYGSGSYYNRILKFDYW

SEQ ID NO: 47637 - protein, 15 aa, Homo sapiens
CARAKGSVVTHFDYW

SEQ ID NO: 47638 - protein, 18 aa, Homo sapiens
CARVLHIWFGELFPIDYW

SEQ ID NO: 47639 - protein, 23 aa, Homo sapiens
CARDVPGGYYDSSSVITDAFDIW

SEQ ID NO: 47640 - protein, 19 aa, Homo sapiens
CARERGLWFGESRGWFDPW

SEQ ID NO: 47641 - protein, 25 aa, Homo sapiens
CAKDIGKYYDILTGYYTDYYGMDVW

SEQ ID NO: 47642 - protein, 23 aa, Homo sapiens
CTRETSDRITIFGVVILDGMDVW

SEQ ID NO: 47643 - protein, 12 aa, Homo sapiens
CVLYVGSGIPVF

SEQ ID NO: 47644 - protein, 21 aa, Homo sapiens
CARAHRPYSGSPKAQAWFDPW

SEQ ID NO: 47645 - protein, 18 aa, Homo sapiens
CARAYYDSSGFISFFDYW

SEQ ID NO: 47646 - protein, 17 aa, Homo sapiens
CAKDGAYSSSTVSFDYW

SEQ ID NO: 47647 - protein, 18 aa, Homo sapiens
CARDRTVAGATGNAFDIW

SEQ ID NO: 47648 - protein, 21 aa, Homo sapiens
CARAPTLRYFDWTYYYYMDVW

SEQ ID NO: 47649 - protein, 17 aa, Homo sapiens
CAREGHTVVRANYFDYW

SEQ ID NO: 47650 - protein, 17 aa, Homo sapiens
CARGGHLRGMGGYFDYW

SEQ ID NO: 47651 - protein, 23 aa, Homo sapiens
CARAPTGSFCSGGRCFTNWFDPW

SEQ ID NO: 47652 - protein, 29 aa, Homo sapiens
CARGEREQRPPLIFGSGTREYDYNGFDVW

SEQ ID NO: 47653 - protein, 15 aa, Homo sapiens
CATPRGYYDSIFDYW

SEQ ID NO: 47654 - protein, 16 aa, Homo sapiens
CTREVKIFGVVTFDYW

SEQ ID NO: 47655 - protein, 18 aa, Homo sapiens
CAKAVTSIAVAGYYFDYW

SEQ ID NO: 47656 - protein, 23 aa, Homo sapiens
CVRVPALWCKDGNCNSRNWFDPW

SEQ ID NO: 47657 - protein, 20 aa, Homo sapiens
CARHPGYPANYYYYYGMDVW

SEQ ID NO: 47658 - protein, 17 aa, Homo sapiens
CARWGIVGPLPRAFDIW

SEQ ID NO: 47659 - protein, 25 aa, Homo sapiens
CARDAHRLYYYDSSGYYGPTYFDYW

SEQ ID NO: 47660 - protein, 19 aa, Homo sapiens
CATDDYTFRGYPENAFNIW

SEQ ID NO: 47661 - protein, 16 aa, Homo sapiens
CARDRGSGRRDAFNMW

SEQ ID NO: 47662 - protein, 19 aa, Homo sapiens
CARWGVIAMFLYYYGMDVW

SEQ ID NO: 47663 - protein, 19 aa, Homo sapiens
CARHDLDGYNYMGDAFDIW

SEQ ID NO: 47664 - protein, 21 aa, Homo sapiens
CAKDMAPPLWFGELLGAFDIW

SEQ ID NO: 47665 - protein, 18 aa, Homo sapiens
CARSEIYSGHYYYYMDVW

SEQ ID NO: 47666 - protein, 23 aa, Homo sapiens
CARNGVVGYDFWSGSSQYYFDYW

SEQ ID NO: 47667 - protein, 11 aa, Homo sapiens
CQQYFDTPLSF

SEQ ID NO: 47668 - protein, 21 aa, Homo sapiens
CARAFQTGGFWSGYYEYFDYW

SEQ ID NO: 47669 - protein, 18 aa, Homo sapiens
CARQGGYDYYYYYGMDVW

SEQ ID NO: 47670 - protein, 16 aa, Homo sapiens
CTTALLWFGELARDYW

SEQ ID NO: 47671 - protein, 18 aa, Homo sapiens
CAREGFWSGYQGGGFDYW

SEQ ID NO: 47672 - protein, 16 aa, Homo sapiens
CARFERRYPMDAFDIW

SEQ ID NO: 47673 - protein, 18 aa, Homo sapiens
CAKSNTAMVYYYYYMDVW

SEQ ID NO: 47674 - protein, 25 aa, Homo sapiens
CARGRNRPLRFLEWLPRVDDAFDIW

SEQ ID NO: 47675 - protein, 13 aa, Homo sapiens
CQQSYNSPRHLTF

SEQ ID NO: 47676 - protein, 24 aa, Homo sapiens
CARDSLGYCSSTSCHYYYYGMDVW

SEQ ID NO: 47677 - protein, 26 aa, Homo sapiens
CARDAYPLRYFDWLLAPYYYYGMDVW

SEQ ID NO: 47678 - protein, 26 aa, Homo sapiens
CARGQEPGGRWITIFGVVMLGSFDYW

SEQ ID NO: 47679 - protein, 18 aa, Homo sapiens
CAKDRWHYDSSGYYLDYW

SEQ ID NO: 47680 - protein, 21 aa, Homo sapiens
CARHLLSQGLWLRMWNWFDPW

SEQ ID NO: 47681 - protein, 20 aa, Homo sapiens
CARDPHYSDSRGFRGFFDSW

SEQ ID NO: 47682 - protein, 17 aa, Homo sapiens
CALLGVDSSGYYDADYW

SEQ ID NO: 47683 - protein, 21 aa, Homo sapiens
CARIRDYGDPRAGSTYYFDYW

SEQ ID NO: 47684 - protein, 23 aa, Homo sapiens
CARDSVSRCSGGSCSSTYYFDYW

SEQ ID NO: 47685 - protein, 26 aa, Homo sapiens
CAKDKGDFIYDYVWGSYRYFSTFDYW

SEQ ID NO: 47686 - protein, 19 aa, Homo sapiens
CARAGATWIQLWLGFFDYW

SEQ ID NO: 47687 - protein, 23 aa, Homo sapiens
CARDQSGYCSSTSCSDFNWFDPW

SEQ ID NO: 47688 - protein, 26 aa, Homo sapiens
CARVPRPPHDSSGYYYFDYYYYMDVW

SEQ ID NO: 47689 - protein, 17 aa, Homo sapiens
CERDSESSSSSYYFDYW

SEQ ID NO: 47690 - protein, 14 aa, Homo sapiens
CARASDYGDRVDYW

SEQ ID NO: 47691 - protein, 23 aa, Homo sapiens
CAHRLAHYDTLTGYYNTQYFDYW

SEQ ID NO: 47692 - protein, 13 aa, Homo sapiens
CYSTHISGNHGIF

SEQ ID NO: 47693 - protein, 21 aa, Homo sapiens
CARAPRYIVVVPAAIGWFDPW

SEQ ID NO: 47694 - protein, 24 aa, Homo sapiens
CARAGPIGWLRPIATTLPYYFDYW

SEQ ID NO: 47695 - protein, 14 aa, Homo sapiens
CAHRRTVTTSFDYW

SEQ ID NO: 47696 - protein, 15 aa, Homo sapiens
CASVSVGAVAGEDYW

SEQ ID NO: 47697 - protein, 22 aa, Homo sapiens
CTTGYYYDSSGLRVYYYGMDVW

SEQ ID NO: 47698 - protein, 19 aa, Homo sapiens
CASSRVNYYDSSGHAFDYW

SEQ ID NO: 47699 - protein, 18 aa, Homo sapiens
CARDLSSSHYYYYGMDVW

SEQ ID NO: 47700 - protein, 17 aa, Homo sapiens
CAKDWSSGWFSYYFDYW

SEQ ID NO: 47701 - protein, 21 aa, Homo sapiens
CARGQGTIFGVVIIPGYFDYW

SEQ ID NO: 47702 - protein, 24 aa, Homo sapiens
CARGGQYYDFWSGYYTNYYGMDVW

SEQ ID NO: 47703 - protein, 15 aa, Homo sapiens
CAREHGSGRGAFDIW

SEQ ID NO: 47704 - protein, 16 aa, Homo sapiens
CAHFSVPSSGSFFDYW

SEQ ID NO: 47705 - protein, 25 aa, Homo sapiens
CARGNPRGGEYSYGYYYYYYYMDVW

SEQ ID NO: 47706 - protein, 16 aa, Homo sapiens
CAREVAAITSYAFDMW

SEQ ID NO: 47707 - protein, 18 aa, Homo sapiens
CARGGAWIQLYAYAFDIW

SEQ ID NO: 47708 - protein, 21 aa, Homo sapiens
CTRGEATSDTAMDIHPPFDYW

SEQ ID NO: 47709 - protein, 17 aa, Homo sapiens
CARGAVVAAFDKAIDYW

SEQ ID NO: 47710 - protein, 24 aa, Homo sapiens
CARGDSGPAYDFWSGYHPYYFDYW

SEQ ID NO: 47711 - protein, 14 aa, Homo sapiens
CARVMGSYGPIDYW

SEQ ID NO: 47712 - protein, 20 aa, Homo sapiens
CARDSPHPHYDFWSGYFDYW

SEQ ID NO: 47713 - protein, 18 aa, Homo sapiens
CASNPGSSKPYYYGMDVW

SEQ ID NO: 47714 - protein, 18 aa, Homo sapiens
CARDSRPVYDSSGYYGYW

SEQ ID NO: 47715 - protein, 16 aa, Homo sapiens
CARDRGGDGYAHFDCW

SEQ ID NO: 47716 - protein, 22 aa, Homo sapiens
CARIRSYYYDRSGNGNWYFDLW

SEQ ID NO: 47717 - protein, 25 aa, Homo sapiens
CARLSCSSPTCENVHVHYYYGMDVW

SEQ ID NO: 47718 - protein, 18 aa, Homo sapiens
CAREGLWNVDYSQYMDVW

SEQ ID NO: 47719 - protein, 18 aa, Homo sapiens
CARAECSPTNCYTAQDYW

SEQ ID NO: 47720 - protein, 18 aa, Homo sapiens
CANLEGSSGWYDGWFDPW

SEQ ID NO: 47721 - protein, 12 aa, Homo sapiens
CTRDLGSYFDLW

SEQ ID NO: 47722 - protein, 12 aa, Homo sapiens
CARDANWAFEYW

SEQ ID NO: 47723 - protein, 20 aa, Homo sapiens
CARGHIVATIFHYYYYMDVW

SEQ ID NO: 47724 - protein, 19 aa, Homo sapiens
CAKDPATRTYYYYYYMDVW

SEQ ID NO: 47725 - protein, 16 aa, Homo sapiens
CAKDSEGGYALDFDYW

SEQ ID NO: 47726 - protein, 21 aa, Homo sapiens
CAKEKSITIFGVVNFNWFDPW

SEQ ID NO: 47727 - protein, 18 aa, Homo sapiens
CAKEGGEAAAGTGAFDIW

SEQ ID NO: 47728 - protein, 20 aa, Homo sapiens
CASSLLYCRTITCSYYMDVW

SEQ ID NO: 47729 - protein, 18 aa, Homo sapiens
CARSDYHIVATIVGFDYW

SEQ ID NO: 47730 - protein, 25 aa, Homo sapiens
CARGRRRITMIVVVIPYYYYGMDVW

SEQ ID NO: 47731 - protein, 24 aa, Homo sapiens
CARLAYYYDSSGYYYSRRNAFDIW

SEQ ID NO: 47732 - protein, 22 aa, Homo sapiens
CTRLRYCSSTSCYSWDDAFDIW

SEQ ID NO: 47733 - protein, 16 aa, Homo sapiens
CVKDLVGTYYYYMDVW

SEQ ID NO: 47734 - protein, 24 aa, Homo sapiens
CARTKSTMIVVVITTHYYYYMDVW

SEQ ID NO: 47735 - protein, 17 aa, Homo sapiens
CARDRRYCSGGSCYDYW

SEQ ID NO: 47736 - protein, 21 aa, Homo sapiens
CARVLMYYCSSTSCSTPFDYW

SEQ ID NO: 47737 - protein, 19 aa, Homo sapiens
CAGSQGVTQLYYYYGMDVW

SEQ ID NO: 47738 - protein, 21 aa, Homo sapiens
CAREGDFHDTGDFPTYYFDYW

SEQ ID NO: 47739 - protein, 31 aa, Homo sapiens
CASGLRYFDWSSLLSEYYYDSSGYYNAFDYW

SEQ ID NO: 47740 - protein, 19 aa, Homo sapiens
CARDGRWGSGWTDDAFDIW

SEQ ID NO: 47741 - protein, 16 aa, Homo sapiens
CAKVSGSSGSGTGDYW

SEQ ID NO: 47742 - protein, 16 aa, Homo sapiens
CARWKSDYSSGWIDYW

SEQ ID NO: 47743 - protein, 20 aa, Homo sapiens
CAKGNKWLRWNYYYYGMDVW

SEQ ID NO: 47744 - protein, 17 aa, Homo sapiens
CAHRGIAVAGTGYFQHW

SEQ ID NO: 47745 - protein, 12 aa, Homo sapiens
CQSTDNSGSLIF

SEQ ID NO: 47746 - protein, 14 aa, Homo sapiens
CARHPPHGYSADYW

SEQ ID NO: 47747 - protein, 16 aa, Homo sapiens
CAKDGIVADLTGYDYW

SEQ ID NO: 47748 - protein, 24 aa, Homo sapiens
CARDLVPSITMIVVVIISGAFDIW

SEQ ID NO: 47749 - protein, 22 aa, Homo sapiens
CARSTWAGTRYFSGSEQDFDYW

SEQ ID NO: 47750 - protein, 23 aa, Homo sapiens
CARGNTGIAVATPRYYYYYMDVW

SEQ ID NO: 47751 - protein, 13 aa, Homo sapiens
CQQHASSPPTSAF

SEQ ID NO: 47752 - protein, 20 aa, Homo sapiens
CARNPPAGIQLWFLYYFDYW

SEQ ID NO: 47753 - protein, 16 aa, Homo sapiens
CAHRLAAVAGPYFDYW

SEQ ID NO: 47754 - protein, 24 aa, Homo sapiens
CARGDGGITIFGVVIKESIYFDYW

SEQ ID NO: 47755 - protein, 15 aa, Homo sapiens
CTTNNWNYDSGRDYW

SEQ ID NO: 47756 - protein, 18 aa, Homo sapiens
CTGDPGVSDWYPQYFQHW

SEQ ID NO: 47757 - protein, 16 aa, Homo sapiens
CVKDIIPLSYHAFDVW

SEQ ID NO: 47758 - protein, 16 aa, Homo sapiens
CARDSQRGGATTFDYW

SEQ ID NO: 47759 - protein, 19 aa, Homo sapiens
CARGAPVTTFYYYYGMDVW

SEQ ID NO: 47760 - protein, 23 aa, Homo sapiens
CARTSYYDSSGYYGAWGRPFDYW

SEQ ID NO: 47761 - protein, 21 aa, Homo sapiens
CAKDGYYYDSSGYKCYYFDYW

SEQ ID NO: 47762 - protein, 18 aa, Homo sapiens
CAKDTTRNYYDNSPIDYW

SEQ ID NO: 47763 - protein, 24 aa, Homo sapiens
CARDLDIVVVPAAIRYYYYGMDVW

SEQ ID NO: 47764 - protein, 21 aa, Homo sapiens
CARSSRGYCSSTSCHGRFDPW

SEQ ID NO: 47765 - protein, 15 aa, Homo sapiens
CATDSSGYYYVADYW

SEQ ID NO: 47766 - protein, 16 aa, Homo sapiens
CARDTMSESLDAFDIW

SEQ ID NO: 47767 - protein, 22 aa, Homo sapiens
CARDGPDYGDYFWYYYYYMDVW

SEQ ID NO: 47768 - protein, 15 aa, Homo sapiens
CARDLIVATPGFDYW

SEQ ID NO: 47769 - protein, 15 aa, Homo sapiens
CASTRRDGYIVFDYW

SEQ ID NO: 47770 - protein, 22 aa, Homo sapiens
CAKWDIVVVPAAHMGTGAFDYW

SEQ ID NO: 47771 - protein, 19 aa, Homo sapiens
CARSSGSSWYPYYYYMDVW

SEQ ID NO: 47772 - protein, 22 aa, Homo sapiens
CAKVVSSYCSGGSCYGGYFDYW

SEQ ID NO: 47773 - protein, 27 aa, Homo sapiens
CARYGRWEKGPYCSGGSCYAGSWFDPW

SEQ ID NO: 47774 - protein, 19 aa, Homo sapiens
CARDSTQFGVITQYYFDYW

SEQ ID NO: 47775 - protein, 21 aa, Homo sapiens
CAKDGTCSGGSCYSVSYFQHW

SEQ ID NO: 47776 - protein, 20 aa, Homo sapiens
CAREAAGLGIAAADWYFDLW

SEQ ID NO: 47777 - protein, 14 aa, Homo sapiens
CARTRLVPWYFDYW

SEQ ID NO: 47778 - protein, 17 aa, Homo sapiens
CARDPPSPAAGTSVDYW

SEQ ID NO: 47779 - protein, 19 aa, Homo sapiens
CAREDLHYDFWSYDAFDIW

SEQ ID NO: 47780 - protein, 16 aa, Homo sapiens
CARRPGSHYKGWFDPW

SEQ ID NO: 47781 - protein, 20 aa, Homo sapiens
CARDKVSSSGWYIGPHFDYW

SEQ ID NO: 47782 - protein, 32 aa, Homo sapiens
CTTDPATYYDFWSGYYGMITFGGVIVQTSDYW

SEQ ID NO: 47783 - protein, 20 aa, Homo sapiens
CARHWVFSSSWFAFLAFDSW

SEQ ID NO: 47784 - protein, 17 aa, Homo sapiens
CATASPHSSSTGWFDPW

SEQ ID NO: 47785 - protein, 20 aa, Homo sapiens
CARSRRGLHDYGGKWGFDYW

SEQ ID NO: 47786 - protein, 18 aa, Homo sapiens
CARSITIFGVVIGWVDYW

SEQ ID NO: 47787 - protein, 19 aa, Homo sapiens
CAREAGVLVVTHSSAFHIW

SEQ ID NO: 47788 - protein, 19 aa, Homo sapiens
CATVAEATGFYYDYYFDYW

SEQ ID NO: 47789 - protein, 22 aa, Homo sapiens
CAKGAGAYCSGGSCYSGRLDYW

SEQ ID NO: 47790 - protein, 18 aa, Homo sapiens
CARGIDLEWLFPNWFDPW

SEQ ID NO: 47791 - protein, 14 aa, Homo sapiens
CTKLTSSWNYPDSW

SEQ ID NO: 47792 - protein, 23 aa, Homo sapiens
CARDLSYYDSSGYSNTERYFDYW

SEQ ID NO: 47793 - protein, 19 aa, Homo sapiens
CARTSITMIVAPRVGFDYW

SEQ ID NO: 47794 - protein, 22 aa, Homo sapiens
CTRDGGRIAAPDPYYYYGMDVW

SEQ ID NO: 47795 - protein, 22 aa, Homo sapiens
CARGRARGITMIVVGFYYFDYW

SEQ ID NO: 47796 - protein, 21 aa, Homo sapiens
CARAEWAVAGRGVAHPYFDLW

SEQ ID NO: 47797 - protein, 24 aa, Homo sapiens
CTREPYADRIMITFGGVNRHFDYW

SEQ ID NO: 47798 - protein, 12 aa, Homo sapiens
CASPPSTGVDYW

SEQ ID NO: 47799 - protein, 14 aa, Homo sapiens
CSRKASSGPSFDQW

SEQ ID NO: 47800 - protein, 19 aa, Homo sapiens
CARSKGDPYYYYYYGMDVW

SEQ ID NO: 47801 - protein, 11 aa, Homo sapiens
CATQPEQLDYW

SEQ ID NO: 47802 - protein, 11 aa, Homo sapiens
CQQANGVPYTF

SEQ ID NO: 47803 - protein, 17 aa, Homo sapiens
CARGYQLLSSTLWFDPW

SEQ ID NO: 47804 - protein, 18 aa, Homo sapiens
CARDRSAYCGGDCYLDNW

SEQ ID NO: 47805 - protein, 17 aa, Homo sapiens
CARDLDYKVPFYYYDSW

SEQ ID NO: 47806 - protein, 18 aa, Homo sapiens
CARDREGAGWLRPGFDYW

SEQ ID NO: 47807 - protein, 15 aa, Homo sapiens
CARVGFGELLGFDYW

SEQ ID NO: 47808 - protein, 25 aa, Homo sapiens
CAKDAVKTYYYDSSGYNGVLDFDYW

SEQ ID NO: 47809 - protein, 13 aa, Homo sapiens
CQSADNSGTFWMF

SEQ ID NO: 47810 - protein, 16 aa, Homo sapiens
CAHRPPGIAAAGLDYW

SEQ ID NO: 47811 - protein, 22 aa, Homo sapiens
CARVLRYFDWLSKYYYYYMDVW

SEQ ID NO: 47812 - protein, 20 aa, Homo sapiens
CAKERTYYYGSFLYNWFDPW

SEQ ID NO: 47813 - protein, 17 aa, Homo sapiens
CAKGNDFWSGPYYMDVW

SEQ ID NO: 47814 - protein, 18 aa, Homo sapiens
CAKSVIVPAAIGDAFDIW

SEQ ID NO: 47815 - protein, 15 aa, Homo sapiens
CAKTPSYSYESSDYW

SEQ ID NO: 47816 - protein, 22 aa, Homo sapiens
CARARSPTYVFDNSGYHQFDYW

SEQ ID NO: 47817 - protein, 21 aa, Homo sapiens
CARHSSTPSWHNTDAAPFDYW

SEQ ID NO: 47818 - protein, 25 aa, Homo sapiens
CARAVVVPAAIRDPIHYYYYGMDVW

SEQ ID NO: 47819 - protein, 15 aa, Homo sapiens
CATNRGYNLRQIDYW

SEQ ID NO: 47820 - protein, 14 aa, Homo sapiens
CARYYHFWSAFDYW

SEQ ID NO: 47821 - protein, 28 aa, Homo sapiens
CAKDGPAKHYSDSSGYEKYYLYYYMDVW

SEQ ID NO: 47822 - protein, 21 aa, Homo sapiens
CARSGGRVLRFLEWLTPFDYW

SEQ ID NO: 47823 - protein, 21 aa, Homo sapiens
CARHEKGITIFGVVKDWFDPW

SEQ ID NO: 47824 - protein, 21 aa, Homo sapiens
CATRVVRYTGVIERASWFDTW

SEQ ID NO: 47825 - protein, 18 aa, Homo sapiens
CARDRRPYSSRYNWFDPW

SEQ ID NO: 47826 - protein, 16 aa, Homo sapiens
CARADGGSYYGAVDYW

SEQ ID NO: 47827 - protein, 25 aa, Homo sapiens
CARDRAASCHSRAESCLASNWFDPW

SEQ ID NO: 47828 - protein, 24 aa, Homo sapiens
CARGYPGGDPTIFGVVILNWFDPW

SEQ ID NO: 47829 - protein, 29 aa, Homo sapiens
CAREKGSLFSGGWIGRLTPQRSLAPFDYW

SEQ ID NO: 47830 - protein, 22 aa, Homo sapiens
CARLYPSGYGSSWPYYHYMDVW

SEQ ID NO: 47831 - protein, 16 aa, Homo sapiens
CAKDKGPSAELWIDYW

SEQ ID NO: 47832 - protein, 21 aa, Homo sapiens
CARDPRVAVGGYDYYYGMDVW

SEQ ID NO: 47833 - protein, 17 aa, Homo sapiens
CAKGDGYSSSSASLDYW

SEQ ID NO: 47834 - protein, 14 aa, Homo sapiens
CAKAHGYGNAFDIW

SEQ ID NO: 47835 - protein, 24 aa, Homo sapiens
CARLRIVVVPGAMLNLGGSAFDIW

SEQ ID NO: 47836 - protein, 16 aa, Homo sapiens
CAKAVVGATLHAFDNW

SEQ ID NO: 47837 - protein, 13 aa, Homo sapiens
CARDRGFQSFDIW

SEQ ID NO: 47838 - protein, 24 aa, Homo sapiens
CARHEARPHELLWFGELSTYFDYW

SEQ ID NO: 47839 - protein, 19 aa, Homo sapiens
CARDSQLWLLDYYYYMDVW

SEQ ID NO: 47840 - protein, 21 aa, Homo sapiens
CARIQGRPRFGEPRGGYFDYW

SEQ ID NO: 47841 - protein, 16 aa, Homo sapiens
CASQFYSGWYEYFDLW

SEQ ID NO: 47842 - protein, 16 aa, Homo sapiens
CARGCDYDRDWYFDLW

SEQ ID NO: 47843 - protein, 21 aa, Homo sapiens
CTTTTYYYDSSGYPNDAFDIW

SEQ ID NO: 47844 - protein, 20 aa, Homo sapiens
CARHGVVGDFWGGYNWLDPW

SEQ ID NO: 47845 - protein, 10 aa, Homo sapiens
CTGPRYFDYW

SEQ ID NO: 47846 - protein, 15 aa, Homo sapiens
CARDKELAIGGRDYW

SEQ ID NO: 47847 - protein, 22 aa, Homo sapiens
CARDYTERIFGVVIQYWYFDLW

SEQ ID NO: 47848 - protein, 20 aa, Homo sapiens
CSKDPAYYYDSGSSNLLDYW

SEQ ID NO: 47849 - protein, 19 aa, Homo sapiens
CARNSYDILTGHEIWFDPW

SEQ ID NO: 47850 - protein, 26 aa, Homo sapiens
CAREMRLRFLEWLSNDAYYYYYMDVW

SEQ ID NO: 47851 - protein, 13 aa, Homo sapiens
CQQYDNLPPMYIF

SEQ ID NO: 47852 - protein, 21 aa, Homo sapiens
CARRGDIVVVPAAIAGWFDPW

SEQ ID NO: 47853 - protein, 13 aa, Homo sapiens
CAKDGLEGYTDYW

SEQ ID NO: 47854 - protein, 22 aa, Homo sapiens
CAKGYSDYDFWSGYYGLGFDYW

SEQ ID NO: 47855 - protein, 19 aa, Homo sapiens
CARDTITMPHYYYYGMDVW

SEQ ID NO: 47856 - protein, 23 aa, Homo sapiens
CARLGLLWFGELLSDYYYGMDVW

SEQ ID NO: 47857 - protein, 17 aa, Homo sapiens
CARRNQGDSFPPYFDFW

SEQ ID NO: 47858 - protein, 18 aa, Homo sapiens
CSGPTCFLTVGKSNFDFW

SEQ ID NO: 47859 - protein, 21 aa, Homo sapiens
CATHWVDIVLVVYALDAFDIW

SEQ ID NO: 47860 - protein, 26 aa, Homo sapiens
CARDRSPEDTVLLVYAISLMDSFDYW

SEQ ID NO: 47861 - protein, 22 aa, Homo sapiens
CAKDQYYDSSGYYYGNNWFDPW

SEQ ID NO: 47862 - protein, 20 aa, Homo sapiens
CARGEGVLRYFIYYYYMDVW

SEQ ID NO: 47863 - protein, 21 aa, Homo sapiens
CAHSPPYSTTWYLRDNWFASW

SEQ ID NO: 47864 - protein, 20 aa, Homo sapiens
CASPVGSYYDFWSGYYLVYW

SEQ ID NO: 47865 - protein, 19 aa, Homo sapiens
CARDSWDDYGDYVGAFDIW

SEQ ID NO: 47866 - protein, 14 aa, Homo sapiens
CARDLNDYGPTDYW

SEQ ID NO: 47867 - protein, 19 aa, Homo sapiens
CAREGAGSSVFYYYYMDVW

SEQ ID NO: 47868 - protein, 24 aa, Homo sapiens
CARGGAWFGELLFSYYYYYYMDVW

SEQ ID NO: 47869 - protein, 15 aa, Homo sapiens
CARLLRSSSPYFDCW

SEQ ID NO: 47870 - protein, 19 aa, Homo sapiens
CARDSRCSGGSCPYAFDIW

SEQ ID NO: 47871 - protein, 18 aa, Homo sapiens
CARVLGVGATTGWYFDLW

SEQ ID NO: 47872 - protein, 17 aa, Homo sapiens
CTRGSMIVVVMGAFDIW

SEQ ID NO: 47873 - protein, 20 aa, Homo sapiens
CAKVRRDIVLMVYALYFDYW

SEQ ID NO: 47874 - protein, 23 aa, Homo sapiens
CARDVTVDFWSGYTGGYNWFDPW

SEQ ID NO: 47875 - protein, 24 aa, Homo sapiens
CATAPVVASLDSYGYYYYYGMDVW

SEQ ID NO: 47876 - protein, 25 aa, Homo sapiens
CARSTPYYDFWSGYSPFHGTRIDYW

SEQ ID NO: 47877 - protein, 14 aa, Homo sapiens
CANSGWTVGAFDIW

SEQ ID NO: 47878 - protein, 21 aa, Homo sapiens
CARMVGSCTRTSCQGLAFDIW

SEQ ID NO: 47879 - protein, 16 aa, Homo sapiens
CARHVKGRKLLWLDYW

SEQ ID NO: 47880 - protein, 17 aa, Homo sapiens
CARGLRQLVPEPNFDYW

SEQ ID NO: 47881 - protein, 22 aa, Homo sapiens
CARRSVLRYFDWLLRHDAFDIW

SEQ ID NO: 47882 - protein, 17 aa, Homo sapiens
CATSTIFGVVTNWFDPW

SEQ ID NO: 47883 - protein, 18 aa, Homo sapiens
CAREPVEMATIQNTDDYW

SEQ ID NO: 47884 - protein, 18 aa, Homo sapiens
CAKGIRYNWNYRSYVDYW

SEQ ID NO: 47885 - protein, 27 aa, Homo sapiens
CARDLDYYDSSGYHRVDYYYYYGMDVW

SEQ ID NO: 47886 - protein, 19 aa, Homo sapiens
CVKDLAVPNTVDNDVFDIW

SEQ ID NO: 47887 - protein, 22 aa, Homo sapiens
CAKGFGGTIFGVVITEYYFDYW

SEQ ID NO: 47888 - protein, 21 aa, Homo sapiens
CARDRSMITFGGVIVIPFDYW

SEQ ID NO: 47889 - protein, 29 aa, Homo sapiens
CARDLILPSTTGISSSWYGIYYYYGMDVW

SEQ ID NO: 47890 - protein, 18 aa, Homo sapiens
CARDPKQRGYSYGYSDYW

SEQ ID NO: 47891 - protein, 17 aa, Homo sapiens
CARDPSSGWYVSHWDYW

SEQ ID NO: 47892 - protein, 21 aa, Homo sapiens
CARQGLSITIFGVVERKFDPW

SEQ ID NO: 47893 - protein, 23 aa, Homo sapiens
CARSYPSSYYYGSGSLALPLDYW

SEQ ID NO: 47894 - protein, 24 aa, Homo sapiens
CARGTGDSSGYFGSYYYYYYMDVW

SEQ ID NO: 47895 - protein, 16 aa, Homo sapiens
CAKDQLGGVTGCFDFW

SEQ ID NO: 47896 - protein, 22 aa, Homo sapiens
CARGSGRTTIFGVVILDAFDIW

SEQ ID NO: 47897 - protein, 21 aa, Homo sapiens
CAHRPDFWSDYYSNYNWFDSW

SEQ ID NO: 47898 - protein, 18 aa, Homo sapiens
CARGGRIGTGYYYGMDVW

SEQ ID NO: 47899 - protein, 21 aa, Homo sapiens
CTTDLVWDIVVVPAARPFDYW

SEQ ID NO: 47900 - protein, 16 aa, Homo sapiens
CAREKRGIRGPSFDYW

SEQ ID NO: 47901 - protein, 17 aa, Homo sapiens
CAKYSTRDPPPRQFDNW

SEQ ID NO: 47902 - protein, 23 aa, Homo sapiens
CARDVGVGYISGWYPNYNWFDPW

SEQ ID NO: 47903 - protein, 18 aa, Homo sapiens
CTRDRERWLQFRGSLDYW

SEQ ID NO: 47904 - protein, 21 aa, Homo sapiens
CARLSAAIQWPLYYYYGMDVW

SEQ ID NO: 47905 - protein, 17 aa, Homo sapiens
CAKGRSGSDDDYYFDYW

SEQ ID NO: 47906 - protein, 17 aa, Homo sapiens
CASRYCSGGSCSRFDPW

SEQ ID NO: 47907 - protein, 20 aa, Homo sapiens
CAREGYSSGWVPLNWYFDLW

SEQ ID NO: 47908 - protein, 23 aa, Homo sapiens
CASTVTYYDILTGQYYFYYMDVW

SEQ ID NO: 47909 - protein, 20 aa, Homo sapiens
CVIARPTPNNYYYYYGMDVW

SEQ ID NO: 47910 - protein, 26 aa, Homo sapiens
CARVVVVPAAIRSRGHYYYYYGMDVW

SEQ ID NO: 47911 - protein, 17 aa, Homo sapiens
CAKDSMVGDILTGWDYW

SEQ ID NO: 47912 - protein, 27 aa, Homo sapiens
CARGSAIPENYYGSGSYFGSADYFDYW

SEQ ID NO: 47913 - protein, 18 aa, Homo sapiens
CATHCSGGSCYGAPFDYW

SEQ ID NO: 47914 - protein, 24 aa, Homo sapiens
CAGIALDFWSGYYTLAKAPRFDYW

SEQ ID NO: 47915 - protein, 22 aa, Homo sapiens
CTTDLGPTYYDILTGYYRIDYW

SEQ ID NO: 47916 - protein, 22 aa, Homo sapiens
CAHSLDVVPVSPATGWDAFDIW

SEQ ID NO: 47917 - protein, 19 aa, Homo sapiens
CARDPGYGFGDLAGHFDYW

SEQ ID NO: 47918 - protein, 18 aa, Homo sapiens
CARDFALEGPTSDAFDVW

SEQ ID NO: 47919 - protein, 15 aa, Homo sapiens
CARLHYTGTYYLDSW

SEQ ID NO: 47920 - protein, 18 aa, Homo sapiens
CARDGEGRYRTADAFDIW

SEQ ID NO: 47921 - protein, 21 aa, Homo sapiens
CTTDRLPYYYDSSGLHDFDYW

SEQ ID NO: 47922 - protein, 14 aa, Homo sapiens
CAHSRYSSPTFYYW

SEQ ID NO: 47923 - protein, 22 aa, Homo sapiens
CARDGRITIFGVAPTRGYIDYW

SEQ ID NO: 47924 - protein, 19 aa, Homo sapiens
CARGDFDFWSDYNDAFDIW

SEQ ID NO: 47925 - protein, 27 aa, Homo sapiens
CARDVGYCTNGVCYGPDDPYYYGMDVW

SEQ ID NO: 47926 - protein, 18 aa, Homo sapiens
CATRSIVVVPAATDFDYW

SEQ ID NO: 47927 - protein, 21 aa, Homo sapiens
CARADLLYKNSSGQGFLFDSW

SEQ ID NO: 47928 - protein, 18 aa, Homo sapiens
CARLPCASSTSCYVEDYW

SEQ ID NO: 47929 - protein, 18 aa, Homo sapiens
CARRPLSGSQDFYYFDYW

SEQ ID NO: 47930 - protein, 15 aa, Homo sapiens
CAMAVAAGSPRIDYW

SEQ ID NO: 47931 - protein, 22 aa, Homo sapiens
CARGIPVQYYYDSSVVDWFDPW

SEQ ID NO: 47932 - protein, 27 aa, Homo sapiens
CARSGPDIGITIFGVVILGSRHAFDIW

SEQ ID NO: 47933 - protein, 15 aa, Homo sapiens
CARARPSYDHRFDSW

SEQ ID NO: 47934 - protein, 15 aa, Homo sapiens
CCSYAGSSTFVNWVF

SEQ ID NO: 47935 - protein, 22 aa, Homo sapiens
CARSRSDFWSGYPPIHWYFDLW

SEQ ID NO: 47936 - protein, 16 aa, Homo sapiens
CAKSDYGNYDVTFDFW

SEQ ID NO: 47937 - protein, 22 aa, Homo sapiens
CARDRSGLERVLTVPFSAFDIW

SEQ ID NO: 47938 - protein, 21 aa, Homo sapiens
CVRGMAEAGRIYVYYYYMDVW

SEQ ID NO: 47939 - protein, 24 aa, Homo sapiens
CAREGGGCSSTSCYTGYYYGMDVW

SEQ ID NO: 47940 - protein, 17 aa, Homo sapiens
CAAGIFSYTSGWAVDYW

SEQ ID NO: 47941 - protein, 21 aa, Homo sapiens
CAKQLGRYYYDSSSGGYFDYW

SEQ ID NO: 47942 - protein, 20 aa, Homo sapiens
CARDFGSGSYRTHWYYMDVW

SEQ ID NO: 47943 - protein, 15 aa, Homo sapiens
CARVISWSGWNFDYW

SEQ ID NO: 47944 - protein, 19 aa, Homo sapiens
CASRYCSGGSCRPDAFDIW

SEQ ID NO: 47945 - protein, 16 aa, Homo sapiens
CARDQVLIVGGAFDIW

SEQ ID NO: 47946 - protein, 18 aa, Homo sapiens
CGIEPPYYNFWIAYFDRW

SEQ ID NO: 47947 - protein, 27 aa, Homo sapiens
CAADSGDLRFLEWLLPTAYYYYYMDVW

SEQ ID NO: 47948 - protein, 22 aa, Homo sapiens
CARQPIGYCNVGNCYAHAFDVW

SEQ ID NO: 47949 - protein, 30 aa, Homo sapiens
CARDNCSGGSCYSVSWGMIVVVSTTFFDYW

SEQ ID NO: 47950 - protein, 21 aa, Homo sapiens
CAREVRILEWFFPDVGWFDPW

SEQ ID NO: 47951 - protein, 21 aa, Homo sapiens
CAKVATCRSPTCYNQIYFDSW

SEQ ID NO: 47952 - protein, 20 aa, Homo sapiens
CARAHYYGSGHWAAVHFDYW

SEQ ID NO: 47953 - protein, 16 aa, Homo sapiens
CTRGSSMIIFYYFDYW

SEQ ID NO: 47954 - protein, 11 aa, Homo sapiens [sequence omitted]

SEQ ID NO: 47955 - protein, 14 aa, Homo sapiens
CTRGQWGSRYFDSW

SEQ ID NO: 47956 - protein, 21 aa, Homo sapiens
CARGDYSGDFSGSYYGGFDLW

SEQ ID NO: 47957 - protein, 16 aa, Homo sapiens
CAKDKYSSGWHSFDYW

SEQ ID NO: 47958 - protein, 26 aa, Homo sapiens
CAKAGGYDFWSGYYDRPYYYYGMDVW

SEQ ID NO: 47959 - protein, 13 aa, Homo sapiens [sequence omitted]

SEQ ID NO: 47960 - protein, 19 aa, Homo sapiens
CARDRVETGDYGVTDFDFW

SEQ ID NO: 47961 - protein, 19 aa, Homo sapiens
CARQGITGTTGLFSWFDPW

SEQ ID NO: 47962 - protein, 28 aa, Homo sapiens
CAKDSSALLTYYYDSSGYYSQGKGFDYW

SEQ ID NO: 47963 - protein, 17 aa, Homo sapiens
CVRDKGGYGLNAALDIW

SEQ ID NO: 47964 - protein, 15 aa, Homo sapiens
CVNLADTSGQGFDYW

SEQ ID NO: 47965 - protein, 22 aa, Homo sapiens
CARAPVAGTELGSWYYYGMDVW

SEQ ID NO: 47966 - protein, 21 aa, Homo sapiens
CAKDGGDGYSRAYQYNWFDPW

SEQ ID NO: 47967 - protein, 24 aa, Homo sapiens
CARGSCINGVCQADYYYHYGMDVW

SEQ ID NO: 47968 - protein, 23 aa, Homo sapiens
CARTLRYSDSLFVTANYKWFDPW

SEQ ID NO: 47969 - protein, 20 aa, Homo sapiens
CARPITIFGVWDYYYGMDVW

SEQ ID NO: 47970 - protein, 18 aa, Homo sapiens
CARYSSRTLRRTYYFDYW

SEQ ID NO: 47971 - protein, 20 aa, Homo sapiens
CARDENLKDIVVVPAVFDYW

SEQ ID NO: 47972 - protein, 14 aa, Homo sapiens
CAREMRAAVTFDYW

SEQ ID NO: 47973 - protein, 23 aa, Homo sapiens
CARLGYDFWSGYHRFYYYGMDVW

SEQ ID NO: 47974 - protein, 17 aa, Homo sapiens
CARSHKYLDLFLYFDYW

SEQ ID NO: 47975 - protein, 23 aa, Homo sapiens
CARGVVVVAATDDYYYYYGMDVW

SEQ ID NO: 47976 - protein, 16 aa, Homo sapiens
CARAPAYSNYDAFDIW

SEQ ID NO: 47977 - protein, 26 aa, Homo sapiens
CARVGGAEEITIFGVVITPKYYFDYW

SEQ ID NO: 47978 - protein, 22 aa, Homo sapiens
CARGVVPAASLFSYYYYYMDVW

SEQ ID NO: 47979 - protein, 24 aa, Homo sapiens
CARDRLRYFDWLLRTDYYYYMDVW

SEQ ID NO: 47980 - protein, 24 aa, Homo sapiens
CARQPESYCGGDCSLYYYYYMDVW

SEQ ID NO: 47981 - protein, 15 aa, Homo sapiens
CARGYCGGDCFGDYW

SEQ ID NO: 47982 - protein, 18 aa, Homo sapiens
CARRHQYFYESSPFFDYW

SEQ ID NO: 47983 - protein, 24 aa, Homo sapiens
CAKDGGVLRFLEWLSQNAYYFDYW

SEQ ID NO: 47984 - protein, 21 aa, Homo sapiens
CARERGSVTIFGVATVAFDIW

SEQ ID NO: 47985 - protein, 22 aa, Homo sapiens
CARERFLENRVGRIYYYYMDVW

SEQ ID NO: 47986 - protein, 21 aa, Homo sapiens
CAKVSRATYYDFWSGTFFDYW

SEQ ID NO: 47987 - protein, 19 aa, Homo sapiens
CARDRVILTGYSYYGMDVW

SEQ ID NO: 47988 - protein, 16 aa, Homo sapiens
CTRAKTTRFHDAYDIW

SEQ ID NO: 47989 - protein, 18 aa, Homo sapiens
CARDPDDRWLLRYYFDYW

SEQ ID NO: 47990 - protein, 14 aa, Homo sapiens
CQSADSSFTYHYAF

SEQ ID NO: 47991 - protein, 18 aa, Homo sapiens
CARDRMYSSGWSDAFDIW

SEQ ID NO: 47992 - protein, 19 aa, Homo sapiens
CARIYCSGGSCDKWYFDLW

SEQ ID NO: 47993 - protein, 22 aa, Homo sapiens
CARQQSITIFGVVIMGGWFDPW

SEQ ID NO: 47994 - protein, 20 aa, Homo sapiens
CARLPPSTDPDYFYYGMDVW

SEQ ID NO: 47995 - protein, 26 aa, Homo sapiens
CARVGYYYDSSGYYPSYYYYYYMDVW

SEQ ID NO: 47996 - protein, 15 aa, Homo sapiens
CARHPNPSPDFFDYW

SEQ ID NO: 47997 - protein, 20 aa, Homo sapiens
CARDIASPSYASDGDDFDYW

SEQ ID NO: 47998 - protein, 17 aa, Homo sapiens
CVKDIASDNSEGYFHRW

SEQ ID NO: 47999 - protein, 16 aa, Homo sapiens
CATERLVSTVVTLDYW

SEQ ID NO: 48000 - protein, 21 aa, Homo sapiens
CARGGDFWSGYYGGLGWFDPW

SEQ ID NO: 48001 - protein, 20 aa, Homo sapiens
CARGDYTLRSLSYYYYMDVW

SEQ ID NO: 48002 - protein, 20 aa, Homo sapiens
CARDPSFGGSSHAGWYFDLW

SEQ ID NO: 48003 - protein, 25 aa, Homo sapiens
CARDSSPRRNLLMVYAIYYYGMDVW

SEQ ID NO: 48004 - protein, 25 aa, Homo sapiens
CVREKVAVTMTRTTTEYYYYGMDVW

SEQ ID NO: 48005 - protein, 25 aa, Homo sapiens
CASFLNLDYYGSVPLFYYFYGMDVW

SEQ ID NO: 48006 - protein, 17 aa, Homo sapiens
CAKDQKTYIRGWDFDLW

SEQ ID NO: 48007 - protein, 22 aa, Homo sapiens
CAKGYHYDSSGYHYKDDAFDIW

SEQ ID NO: 48008 - protein, 23 aa, Homo sapiens
CARAGNYYDSSGYTGRNDAFDIW

SEQ ID NO: 48009 - protein, 14 aa, Homo sapiens
CARGPRESTMKDYW

SEQ ID NO: 48010 - protein, 15 aa, Homo sapiens
CARTIRVAGVAFDIW

SEQ ID NO: 48011 - protein, 21 aa, Homo sapiens
CARALGYCYSNRCSTWGFDHW

SEQ ID NO: 48012 - protein, 19 aa, Homo sapiens
CARVPHYYDSSGYRTFDYW

SEQ ID NO: 48013 - protein, 9 aa, Homo sapiens
CMQSIQLGF

SEQ ID NO: 48014 - protein, 13 aa, Homo sapiens
CQHHNNYPPALTF

SEQ ID NO: 48015 - protein, 19 aa, Homo sapiens
CAHIGFDTSSYYPYYFDYW

SEQ ID NO: 48016 - protein, 19 aa, Homo sapiens
CARTMVRGAHTSSLAFDIW

SEQ ID NO: 48017 - protein, 20 aa, Homo sapiens
CAKSVYSYGYFLGYYYMDVW

SEQ ID NO: 48018 - protein, 14 aa, Homo sapiens
CASSMVRGVQIDYW

SEQ ID NO: 48019 - protein, 26 aa, Homo sapiens
CAKGGQPTNYGFWSGYRELRGYFDYW

SEQ ID NO: 48020 - protein, 13 aa, Homo sapiens
CASPGMIVAFDPW

SEQ ID NO: 48021 - protein, 24 aa, Homo sapiens
CAREVDYYDSSGYHLGYYYGMDVW

SEQ ID NO: 48022 - protein, 19 aa, Homo sapiens
CATTVGAARYYYYYYMDVW

SEQ ID NO: 48023 - protein, 21 aa, Homo sapiens
CASHISSGSYRYYYYYFMDVW

SEQ ID NO: 48024 - protein, 23 aa, Homo sapiens
CARAVTFYYDRTGYRVPGLFDHW

SEQ ID NO: 48025 - protein, 16 aa, Homo sapiens
CAKAALAGWDDSFDIW

SEQ ID NO: 48026 - protein, 24 aa, Homo sapiens
CARGVVATQYNLDSSGYSNWFDPW

SEQ ID NO: 48027 - protein, 20 aa, Homo sapiens
CARGEEEQRDNYYSYYMDVW

SEQ ID NO: 48028 - protein, 18 aa, Homo sapiens
CAIPPEWGSDSGEPFDLW

SEQ ID NO: 48029 - protein, 18 aa, Homo sapiens
CVGANVDTAMVSFWFDPW

SEQ ID NO: 48030 - protein, 21 aa, Homo sapiens
CARSMKGAAAGTRIYNWFDPW

SEQ ID NO: 48031 - protein, 24 aa, Homo sapiens
CARSLYVYDILTGYPYYYYGMDVW

SEQ ID NO: 48032 - protein, 20 aa, Homo sapiens
CTRDLTYDFWSGYYSSFDYW

SEQ ID NO: 48033 - protein, 12 aa, Homo sapiens
CAALEQLVRDYW

SEQ ID NO: 48034 - protein, 21 aa, Homo sapiens
CTTDTYYDFWSGYYGPPFDYW

SEQ ID NO: 48035 - protein, 30 aa, Homo sapiens
CAKGTRGKESREALQSFDRLVGPPDNFDYW

SEQ ID NO: 48036 - protein, 25 aa, Homo sapiens
CARDTENYDIWRAIAPRIYLAMDVW

SEQ ID NO: 48037 - protein, 19 aa, Homo sapiens
CAKDKDPVGEGGRYAFDIW

SEQ ID NO: 48038 - protein, 24 aa, Homo sapiens
CARLGRAMIVVVMEHYYYYYMDVW

SEQ ID NO: 48039 - protein, 20 aa, Homo sapiens
CARHRILEWLGTGASYMDVW

SEQ ID NO: 48040 - protein, 18 aa, Homo sapiens
CAKDVDWNYLLGYYFDYW

SEQ ID NO: 48041 - protein, 20 aa, Homo sapiens
CARVGHWSGYPPQFNYMDVW

SEQ ID NO: 48042 - protein, 27 aa, Homo sapiens
CAKVLSWGQYGDSHQDDYYYYYGMDVW

SEQ ID NO: 48043 - protein, 14 aa, Homo sapiens
CRLTTRGGGTNDYW

SEQ ID NO: 48044 - protein, 20 aa, Homo sapiens
CARVGVEMASRVYYYGMDVW

SEQ ID NO: 48045 - protein, 17 aa, Homo sapiens
CARHGLGVAVKEAIDYW

SEQ ID NO: 48046 - protein, 16 aa, Homo sapiens
CATSISVTGPDAFDIW

SEQ ID NO: 48047 - protein, 22 aa, Homo sapiens
CARSAWWCSGGSCYRDWYFDLW

SEQ ID NO: 48048 - protein, 22 aa, Homo sapiens
CAKEGYYDYVWGSYPGYYFDYW

SEQ ID NO: 48049 - protein, 20 aa, Homo sapiens
CARDSIELGWLQFNDYFDYW

SEQ ID NO: 48050 - protein, 20 aa, Homo sapiens
CARARLEWLLFDYYYYMDVW

SEQ ID NO: 48051 - protein, 20 aa, Homo sapiens
CAKDKGVVTAIRYYYGMDVW

SEQ ID NO: 48052 - protein, 17 aa, Homo sapiens
CARSSSSWSDLDAFDIW

SEQ ID NO: 48053 - protein, 16 aa, Homo sapiens
CAKAGLPVGATRFDYW

SEQ ID NO: 48054 - protein, 15 aa, Homo sapiens
CVRFPAMPAAALDYW

SEQ ID NO: 48055 - protein, 19 aa, Homo sapiens
CAYSPAYCGADCYDAFHFW

SEQ ID NO: 48056 - protein, 19 aa, Homo sapiens
CARVRTGGQPRRYWSFDLW

SEQ ID NO: 48057 - protein, 20 aa, Homo sapiens
CARDCDSGNSKSCGGAFDIW

SEQ ID NO: 48058 - protein, 17 aa, Homo sapiens
CAKGHRGYSSSWYMYYW

SEQ ID NO: 48059 - protein, 24 aa, Homo sapiens
CARRVGASGCHDFTCYHYYYMDVW

SEQ ID NO: 48060 - protein, 22 aa, Homo sapiens
CAREDYSASGNWYPFHNWFDPW

SEQ ID NO: 48061 - protein, 23 aa, Homo sapiens
CAKDDLPGGSIHGAYYYFGMDVW

SEQ ID NO: 48062 - protein, 23 aa, Homo sapiens
CARLTVTPGNPTGFYYYYYMDVW

SEQ ID NO: 48063 - protein, 21 aa, Homo sapiens
CARGPVLRYFDWLLSNWFDPW

SEQ ID NO: 48064 - protein, 19 aa, Homo sapiens
CARGNNWNYFYYYYYMDVW

SEQ ID NO: 48065 - protein, 20 aa, Homo sapiens
CARGVRRLRFLEWLLLFDYW

SEQ ID NO: 48066 - protein, 19 aa, Homo sapiens
CAREEWLRNYYYYYGMDVW

SEQ ID NO: 48067 - protein, 20 aa, Homo sapiens
CAKVPWPSMIVVVITWFDPW

SEQ ID NO: 48068 - protein, 22 aa, Homo sapiens
CARRRADYDESDFYYYSGFDYW

SEQ ID NO: 48069 - protein, 19 aa, Homo sapiens
CAKDWYYDSSGYSVLFDYW

SEQ ID NO: 48070 - protein, 23 aa, Homo sapiens
CARAIGYYDSSGYLLFDEYFQHW

SEQ ID NO: 48071 - protein, 15 aa, Homo sapiens
CARLPTVFVRTFDSW

SEQ ID NO: 48072 - protein, 17 aa, Homo sapiens
CARLHQSLRFSGGFDPW

SEQ ID NO: 48073 - protein, 23 aa, Homo sapiens
CAKATSDGYGSGSYYNKYGMDVW

SEQ ID NO: 48074 - protein, 16 aa, Homo sapiens
CARGDYRGSGGLADYW

SEQ ID NO: 48075 - protein, 17 aa, Homo sapiens
CVKTPSTTGLSWYFDLW

SEQ ID NO: 48076 - protein, 19 aa, Homo sapiens
CTTDRIVVVVAARDAFDIW

SEQ ID NO: 48077 - protein, 22 aa, Homo sapiens
CARGGYGSGSYGLHYYYGMDVW

SEQ ID NO: 48078 - protein, 24 aa, Homo sapiens
CAGGSPPLYYDDRSATVRGAFDIW

SEQ ID NO: 48079 - protein, 16 aa, Homo sapiens
CARSPPVAGHVYFDYW

SEQ ID NO: 48080 - protein, 23 aa, Homo sapiens
CARLRPPRSSSWPGYYYYGLDVW

SEQ ID NO: 48081 - protein, 17 aa, Homo sapiens
CTSSDLLDYYYYGMDVW

SEQ ID NO: 48082 - protein, 20 aa, Homo sapiens
CATYLYYDFWSGYSYYFDYW

SEQ ID NO: 48083 - protein, 13 aa, Homo sapiens
CQSTDSSGTCAIF

SEQ ID NO: 48084 - protein, 15 aa, Homo sapiens
CARAHLPAAMAFDIW

SEQ ID NO: 48085 - protein, 18 aa, Homo sapiens
CVRDTRDSSGWYAILDYW

SEQ ID NO: 48086 - protein, 22 aa, Homo sapiens
CAKQTNVTIVVVVAAVYYFDYW

SEQ ID NO: 48087 - protein, 29 aa, Homo sapiens
CARDQKYYDILTGYLTPRGPYYYYYMDVW

SEQ ID NO: 48088 - protein, 22 aa, Homo sapiens
CARDQPSTIFGVVTLPSGFDPW

SEQ ID NO: 48089 - protein, 20 aa, Homo sapiens
CVRGSCPGRICSQPYYFDSW

SEQ ID NO: 48090 - protein, 18 aa, Homo sapiens
CARIMRQWLGIYWYFDLW

SEQ ID NO: 48091 - protein, 20 aa, Homo sapiens
CAKCGSIQLWLREVRYFDYW

SEQ ID NO: 48092 - protein, 20 aa, Homo sapiens
CARSINDFWTGYGPYAMDVW

SEQ ID NO: 48093 - protein, 24 aa, Homo sapiens
CARGGAYYYDSSCFLQADDAFDIW

SEQ ID NO: 48094 - protein, 18 aa, Homo sapiens
CARYSYPPGGSSGWFDYW

SEQ ID NO: 48095 - protein, 24 aa, Homo sapiens
CARGGDKRAIVLVVYATPYPFDYW

SEQ ID NO: 48096 - protein, 19 aa, Homo sapiens
CARRPAPSGRTGSRYYDLW

SEQ ID NO: 48097 - protein, 19 aa, Homo sapiens
CASPTKNIVGATGNAFDIW

SEQ ID NO: 48098 - protein, 20 aa, Homo sapiens
CARHSSTMIVVVITPYFDYW

SEQ ID NO: 48099 - protein, 23 aa, Homo sapiens
CARDCTFYSDSYDTSPGDDLDYW

SEQ ID NO: 48100 - protein, 16 aa, Homo sapiens
CAKDIDKYNRGYFASW

SEQ ID NO: 48101 - protein, 19 aa, Homo sapiens
CAKDEVIVVVPAAPTFDYW

SEQ ID NO: 48102 - protein, 19 aa, Homo sapiens
CARGPYVWGSYSYWYFDLW

SEQ ID NO: 48103 - protein, 14 aa, Homo sapiens
CAHRKFWSGYFPYW

SEQ ID NO: 48104 - protein, 29 aa, Homo sapiens
CAKDQGYQGEWELLLNPWRGPINGLPDYW

SEQ ID NO: 48105 - protein, 21 aa, Homo sapiens
CARGGLGCSGGSCYRYYFDYW

SEQ ID NO: 48106 - protein, 17 aa, Homo sapiens
CARDGSGSYYYGWFDPW

SEQ ID NO: 48107 - protein, 17 aa, Homo sapiens
CARDGDTAMATDAFDIW

SEQ ID NO: 48108 - protein, 24 aa, Homo sapiens
CARAMVRGVIITGRYYYYYYMDVW

SEQ ID NO: 48109 - protein, 19 aa, Homo sapiens
CAREGAGTMIVVNDAFDIW

SEQ ID NO: 48110 - protein, 17 aa, Homo sapiens
CARSSSSWYLFGWFDPW

SEQ ID NO: 48111 - protein, 17 aa, Homo sapiens
CARVSWSPSGWRIFDSW

SEQ ID NO: 48112 - protein, 14 aa, Homo sapiens
CQSYDNSPRAYWVF

SEQ ID NO: 48113 - protein, 20 aa, Homo sapiens
CTTVWYSSSGYGWVKLFDYW

SEQ ID NO: 48114 - protein, 22 aa, Homo sapiens
CARHVASGLLLFEALPLHFDFW

SEQ ID NO: 48115 - protein, 22 aa, Homo sapiens
CARGSAQWLWFGESNPYYMDVW

SEQ ID NO: 48116 - protein, 24 aa, Homo sapiens
CAKEQYYYDSSGYRGYYYYGMDVW

SEQ ID NO: 48117 - protein, 28 aa, Homo sapiens
CARSSQSERRTIFGVVIPFFYYYAMDVW

SEQ ID NO: 48118 - protein, 20 aa, Homo sapiens
CARESGYGSGWYTGNWFEHW

SEQ ID NO: 48119 - protein, 16 aa, Homo sapiens
CARPQYLGYYYGMDVW

SEQ ID NO: 48120 - protein, 16 aa, Homo sapiens
CARGNYDILTGYIDYW

SEQ ID NO: 48121 - protein, 26 aa, Homo sapiens
CAKDPRDWSITMIVVVTQRSGYFDYW

SEQ ID NO: 48122 - protein, 17 aa, Homo sapiens
CAKAQYQLLTHNWFDPW

SEQ ID NO: 48123 - protein, 27 aa, Homo sapiens
CARVKGGEALTLWFGELSLIAHAFDIW

SEQ ID NO: 48124 - protein, 20 aa, Homo sapiens
CAKAPVGSCRSTLCYHFDHW

SEQ ID NO: 48125 - protein, 14 aa, Homo sapiens
CALSYSSRRPFDYW

SEQ ID NO: 48126 - protein, 15 aa, Homo sapiens
CARGYGDYVPNFDYW

SEQ ID NO: 48127 - protein, 26 aa, Homo sapiens
CAREVVVVPAAMWGKAYYYYYYMDVW

SEQ ID NO: 48128 - protein, 20 aa, Homo sapiens
CARRLVETSMVDGHDAFDIW

SEQ ID NO: 48129 - protein, 12 aa, Homo sapiens [sequence omitted]

SEQ ID NO: 48130 - protein, 21 aa, Homo sapiens
CASPLRFLEWLSLTNWYFDLW

SEQ ID NO: 48131 - protein, 16 aa, Homo sapiens
CARDNEWLVPGWFDPW

SEQ ID NO: 48132 - protein, 24 aa, Homo sapiens
CVREAVGYSTSSRPVYYYYYMDVW

SEQ ID NO: 48133 - protein, 23 aa, Homo sapiens
CAKDVWYYDILTGYSQPGGFDYW

SEQ ID NO: 48134 - protein, 17 aa, Homo sapiens
CARISGYSSSWPTFDYW

SEQ ID NO: 48135 - protein, 22 aa, Homo sapiens
CARGGYSSSWYSQYYYYGMDVW

SEQ ID NO: 48136 - protein, 24 aa, Homo sapiens
CARDLPRGIAAAGPDYYYYDMDVW

SEQ ID NO: 48137 - protein, 19 aa, Homo sapiens
CAKQGTITMIVVPNYFDYW

SEQ ID NO: 48138 - protein, 28 aa, Homo sapiens
CAKDRILGYCSGGSCYSHYYYYYGMDVW

SEQ ID NO: 48139 - protein, 16 aa, Homo sapiens
CASLPRFFEWSPTDYW

SEQ ID NO: 48140 - protein, 18 aa, Homo sapiens
CAKDQADSNYVFSWFDPW

SEQ ID NO: 48141 - protein, 16 aa, Homo sapiens
CATIPAIFGVALPDYW

SEQ ID NO: 48142 - protein, 23 aa, Homo sapiens
CARALRSTIFGVVIIEKRPFGYW

SEQ ID NO: 48143 - protein, 20 aa, Homo sapiens
CATPKTDSSGYYYEGGFDYW

SEQ ID NO: 48144 - protein, 21 aa, Homo sapiens
CARHGTPYCGGDCYSNWFDPW

SEQ ID NO: 48145 - protein, 23 aa, Homo sapiens
CAKDSIVLMVYAIRGYYYGMDVW

SEQ ID NO: 48146 - protein, 22 aa, Homo sapiens
CARDRYYYDRNDYQFYYYMDVW

SEQ ID NO: 48147 - protein, 25 aa, Homo sapiens
CARAAISDSSGYYLGSLPYWYFDLW

SEQ ID NO: 48148 - protein, 20 aa, Homo sapiens
CARDQGGYSSSSQTYYFDYW

SEQ ID NO: 48149 - protein, 13 aa, Homo sapiens
CMQSLQSPPALTF

SEQ ID NO: 48150 - protein, 24 aa, Homo sapiens
CARAGGRGTIFGVVIIPHNWFDPW

SEQ ID NO: 48151 - protein, 32 aa, Homo sapiens
CALPILRDEDTAVYYCARPVKYSSGWYFFDYW

SEQ ID NO: 48152 - protein, 21 aa, Homo sapiens
CAREGGVTIFGVVTDYYFDYW

SEQ ID NO: 48153 - protein, 23 aa, Homo sapiens
CARGSQLRRYLDRPPQNDAFHVW

SEQ ID NO: 48154 - protein, 18 aa, Homo sapiens
CARGPWIQLWSLVSFDYW

SEQ ID NO: 48155 - protein, 24 aa, Homo sapiens
CAKSSAGTIVVVPPPYYYYGMDVW

SEQ ID NO: 48156 - protein, 20 aa, Homo sapiens
CARWHYDSSGYNPYWYFDLW

SEQ ID NO: 48157 - protein, 22 aa, Homo sapiens
CARGYCSSTSCYSAAVRYFDYW

SEQ ID NO: 48158 - protein, 19 aa, Homo sapiens
CASLYSGSYKGWDWYFDLW

SEQ ID NO: 48159 - protein, 21 aa, Homo sapiens
CARSRRITMVRGVMPSPFDYW

SEQ ID NO: 48160 - protein, 19 aa, Homo sapiens
CARPRVVAMTTVSAWFDPW

SEQ ID NO: 48161 - protein, 18 aa, Homo sapiens
CAKLKLPILTGSYYFDYW

SEQ ID NO: 48162 - protein, 15 aa, Homo sapiens
CAMSYYEYYYGMDVW

SEQ ID NO: 48163 - protein, 21 aa, Homo sapiens
CARKMREVTIFGVVDWYFDLW

SEQ ID NO: 48164 - protein, 20 aa, Homo sapiens
CTTFLNFPPAAWPSGAIDYW

SEQ ID NO: 48165 - protein, 16 aa, Homo sapiens
CARGRDYGDYIAFDIW

SEQ ID NO: 48166 - protein, 16 aa, Homo sapiens
CARDTGDGYNERDDYW

SEQ ID NO: 48167 - protein, 24 aa, Homo sapiens
CARTLFPYQPLDPSFYYYYYMDVW

SEQ ID NO: 48168 - protein, 14 aa, Homo sapiens
CAHRSSSYYAFDYW

SEQ ID NO: 48169 - protein, 19 aa, Homo sapiens
CARSPLASYDSSGLAFDYW

SEQ ID NO: 48170 - protein, 22 aa, Homo sapiens
CARGSYDYIRGYSGYDSSSDYW

SEQ ID NO: 48171 - protein, 17 aa, Homo sapiens
CARPQMTTVTTVWFDPW

SEQ ID NO: 48172 - protein, 13 aa, Homo sapiens
CQHYNNWPPLVSF

SEQ ID NO: 48173 - protein, 14 aa, Homo sapiens
CARGLLGERKIDYW

SEQ ID NO: 48174 - protein, 16 aa, Homo sapiens
CAIRYALLAVAGFDYW

SEQ ID NO: 48175 - protein, 18 aa, Homo sapiens
CARDPGYSSSQWDYFDYW

SEQ ID NO: 48176 - protein, 24 aa, Homo sapiens
CARAPRHYYDSSGYYHLLDYFDYW

SEQ ID NO: 48177 - protein, 24 aa, Homo sapiens
CARDQGDSRYSSGWFYYYYYMDVW

SEQ ID NO: 48178 - protein, 28 aa, Homo sapiens
CARVTYDYVWGSSPLGGSYYYYYGMDVW

SEQ ID NO: 48179 - protein, 23 aa, Homo sapiens
CARAEGSRITIFGVVIIGAFDIW

SEQ ID NO: 48180 - protein, 22 aa, Homo sapiens
CARGRGRTVNILTVSYYYMDVW

SEQ ID NO: 48181 - protein, 21 aa, Homo sapiens
CARDSYGYLGGFYYYYGMDVW

SEQ ID NO: 48182 - protein, 19 aa, Homo sapiens
CATERVPSYNWNDYNFDCW

SEQ ID NO: 48183 - protein, 16 aa, Homo sapiens
CARRISTPALARFDPW

SEQ ID NO: 48184 - protein, 14 aa, Homo sapiens
CARVGSSSWYFDYW

SEQ ID NO: 48185 - protein, 19 aa, Homo sapiens
CARQHYDFWSGYYTIGDYW

SEQ ID NO: 48186 - protein, 17 aa, Homo sapiens
CARGGGNGFYYDSLDVW

SEQ ID NO: 48187 - protein, 22 aa, Homo sapiens
CARDLREYDSSGYISTGAFDIW

SEQ ID NO: 48188 - protein, 22 aa, Homo sapiens
CAKSLDYYDSSGYGRNDAFDIW

SEQ ID NO: 48189 - protein, 20 aa, Homo sapiens
CARGGPAYYDSSGYGRFDYW

SEQ ID NO: 48190 - protein, 17 aa, Homo sapiens
CARDPSAAQLRGPFDSW

SEQ ID NO: 48191 - protein, 26 aa, Homo sapiens
CAKDAQLPNYYGSGSYAGPLGYFDLW

SEQ ID NO: 48192 - protein, 15 aa, Homo sapiens
CATGFAVVVNPLDYW

SEQ ID NO: 48193 - protein, 18 aa, Homo sapiens
CARPHYFDWLSSDAFDIW

SEQ ID NO: 48194 - protein, 17 aa, Homo sapiens
CTKDGPQQLVPYYMDVW

SEQ ID NO: 48195 - protein, 21 aa, Homo sapiens
CARVLTEEGRGYYYYYGMDVW

SEQ ID NO: 48196 - protein, 19 aa, Homo sapiens
CARDSARSWMIFEYYFDYW

SEQ ID NO: 48197 - protein, 24 aa, Homo sapiens
CARGGYSSGRHRERSYYYYYMDVW

SEQ ID NO: 48198 - protein, 15 aa, Homo sapiens
CARGGLANWADFDYW

SEQ ID NO: 48199 - protein, 20 aa, Homo sapiens
CARGPYYDFWSGYYTGFDYW

SEQ ID NO: 48200 - protein, 23 aa, Homo sapiens
CAREGSWYYDSSGYYPLNWFDPW

SEQ ID NO: 48201 - protein, 25 aa, Homo sapiens
CARDPLLFCSGGSCYSGVRDYFDYW

SEQ ID NO: 48202 - protein, 19 aa, Homo sapiens
CATWGDTIFGVVTKYFDYW

SEQ ID NO: 48203 - protein, 20 aa, Homo sapiens
CARDCHYYDSNTYYYYFDSW

SEQ ID NO: 48204 - protein, 21 aa, Homo sapiens
CARGDGHMVRGVMFTSNFDYW

SEQ ID NO: 48205 - protein, 16 aa, Homo sapiens
CARDSMKMSTIPFDYW

SEQ ID NO: 48206 - protein, 17 aa, Homo sapiens
CVREGYCSSTSCPADYW

SEQ ID NO: 48207 - protein, 15 aa, Homo sapiens
CARDRDSSSWFNDYW

SEQ ID NO: 48208 - protein, 16 aa, Homo sapiens
CARGDAAGWFYYMDVW

SEQ ID NO: 48209 - protein, 21 aa, Homo sapiens
CARDTGLYCGGDCYSGNLDYW

SEQ ID NO: 48210 - protein, 14 aa, Homo sapiens
CARWWEPEAAFDFW

SEQ ID NO: 48211 - protein, 19 aa, Homo sapiens
CARWDTIFGVVTREYFQHW

SEQ ID NO: 48212 - protein, 16 aa, Homo sapiens
CARVAIRDGYSPYDYW

SEQ ID NO: 48213 - protein, 12 aa, Homo sapiens
CAKTVGEVFDYW

SEQ ID NO: 48214 - protein, 21 aa, Homo sapiens
CARGPLFGVVTAIEYNWFDPW

SEQ ID NO: 48215 - protein, 19 aa, Homo sapiens
CHIRGPGLDNYRGRYFDYW

SEQ ID NO: 48216 - protein, 24 aa, Homo sapiens
CAKDMGIFGVVMTIGYYYYGMDVW

SEQ ID NO: 48217 - protein, 21 aa, Homo sapiens
CASLVRYYVGIDYYYYYMDVW

SEQ ID NO: 48218 - protein, 13 aa, Homo sapiens
CASLTGTTFGDYW

SEQ ID NO: 48219 - protein, 22 aa, Homo sapiens
CAKVGDDFWGGFYARNPEFDYW

SEQ ID NO: 48220 - protein, 17 aa, Homo sapiens
CAHTYYYDNSGYDYDYW

SEQ ID NO: 48221 - protein, 15 aa, Homo sapiens
CARVSLRYFGGGDYW

SEQ ID NO: 48222 - protein, 25 aa, Homo sapiens
CARGNYYYDSSGYYYRRYYYYMDVW

SEQ ID NO: 48223 - protein, 20 aa, Homo sapiens
CARVQLLGPWGYYYYYMDVW

SEQ ID NO: 48224 - protein, 15 aa, Homo sapiens
CATDVEEYSSSFDYW

SEQ ID NO: 48225 - protein, 22 aa, Homo sapiens
CARGDTYYDILTGYSSHYFDYW

SEQ ID NO: 48226 - protein, 25 aa, Homo sapiens
CARGAVSPHRYNWNPRYYYYYMDVW

SEQ ID NO: 48227 - protein, 14 aa, Homo sapiens
CARGTVVTLGYDYW

SEQ ID NO: 48228 - protein, 17 aa, Homo sapiens
CAKQKYFLPVRSYFDLW

SEQ ID NO: 48229 - protein, 21 aa, Homo sapiens
CAKDIGPTIFGVVTSNWFDPW

SEQ ID NO: 48230 - protein, 21 aa, Homo sapiens
CARMGGFCSGNTCYSHYFDYW

SEQ ID NO: 48231 - protein, 19 aa, Homo sapiens
CARDRDILTGYDNDAFDIW

SEQ ID NO: 48232 - protein, 17 aa, Homo sapiens
CATPRGLHYGDYGFDYW

SEQ ID NO: 48233 - protein, 17 aa, Homo sapiens
CAKDVQQLVLAPIHDYW

SEQ ID NO: 48234 - protein, 17 aa, Homo sapiens
CARDAGSSWFGDAFDIW

SEQ ID NO: 48235 - protein, 19 aa, Homo sapiens
CAAYYYDSTGSYYGEVDYW

SEQ ID NO: 48236 - protein, 16 aa, Homo sapiens
CARRRFLEWLSAFDIW

SEQ ID NO: 48237 - protein, 15 aa, Homo sapiens
CAKGPMSLRSFFDDW

SEQ ID NO: 48238 - protein, 21 aa, Homo sapiens
CARDLGYSNIRYFYYYTMDVW

SEQ ID NO: 48239 - protein, 19 aa, Homo sapiens
CTSAPAGHSIAAAGWFDPW

SEQ ID NO: 48240 - protein, 18 aa, Homo sapiens
CARDSYCTNGVCYALDYW

SEQ ID NO: 48241 - protein, 16 aa, Homo sapiens
CAKGGQQLVRWYFDLW

SEQ ID NO: 48242 - protein, 18 aa, Homo sapiens
CASDSSGYSLSPDAFDIW

SEQ ID NO: 48243 - protein, 23 aa, Homo sapiens
CARDLQIWYYYDSSGYLNWFDPW

SEQ ID NO: 48244 - protein, 25 aa, Homo sapiens
CAPAPFIMLRGVPGLVRGLAAMDVW

SEQ ID NO: 48245 - protein, 22 aa, Homo sapiens
CARSSLDYGDYIFGYYYYMDVW

SEQ ID NO: 48246 - protein, 15 aa, Homo sapiens
CARDLVWGYSFSDYW

SEQ ID NO: 48247 - protein, 20 aa, Homo sapiens
CAKEGVPYTATSKRGYMDVW

SEQ ID NO: 48248 - protein, 14 aa, Homo sapiens
CARHSVVTDTFDVW

SEQ ID NO: 48249 - protein, 16 aa, Homo sapiens
CAKDIRGVAAAGFDYW

SEQ ID NO: 48250 - protein, 28 aa, Homo sapiens
CARDVSRYYDFWSGYYTGPRSGRWFDPW

SEQ ID NO: 48251 - protein, 20 aa, Homo sapiens
CARAATMIVKPFYYYGMDVW

SEQ ID NO: 48252 - protein, 19 aa, Homo sapiens
CAKDERVSRRFQGYYFQYW

SEQ ID NO: 48253 - protein, 16 aa, Homo sapiens
CATASAAGASTWFDPW

SEQ ID NO: 48254 - protein, 16 aa, Homo sapiens
CAIHSPKTMRGWFDPW

SEQ ID NO: 48255 - protein, 26 aa, Homo sapiens
CARDRSDIVVVPAAIPVRRVGWFDPW

SEQ ID NO: 48256 - protein, 24 aa, Homo sapiens
CARDQHLWDCTGGVCYIRGGLDYW

SEQ ID NO: 48257 - protein, 14 aa, Homo sapiens
CARRAKWKQIPDYW

SEQ ID NO: 48258 - protein, 19 aa, Homo sapiens
CTRDLYDSSGYYHSNIDYW

SEQ ID NO: 48259 - protein, 26 aa, Homo sapiens
CARARRESRPYCGWTSCFYYYYMDVW

SEQ ID NO: 48260 - protein, 12 aa, Homo sapiens [sequence omitted]

SEQ ID NO: 48261 - protein, 16 aa, Homo sapiens
CARDKFDSPGDAFDIW

SEQ ID NO: 48262 - protein, 31 aa, Homo sapiens
CAREDIVVVPAAISRGPNHNPYYYYYYMDVW

SEQ ID NO: 48263 - protein, 18 aa, Homo sapiens
CAKGLKTYYYDSSGFYYW

SEQ ID NO: 48264 - protein, 23 aa, Homo sapiens
CARGDVVVAAASRYSYYYGMDVW

SEQ ID NO: 48265 - protein, 17 aa, Homo sapiens
CAKLGTTVVTPDWFDPW

SEQ ID NO: 48266 - protein, 21 aa, Homo sapiens
CVKDRWPFGSGTHYNDAFDMW

SEQ ID NO: 48267 - protein, 19 aa, Homo sapiens
CARGDFDWLLYGLYYFDYW

SEQ ID NO: 48268 - protein, 27 aa, Homo sapiens
CARSTRLYYYDSSLVDRIMGYWYFDLW

SEQ ID NO: 48269 - protein, 22 aa, Homo sapiens
CARGLIESSSWFDYYYYGMDVW

SEQ ID NO: 48270 - protein, 15 aa, Homo sapiens
CAKGAWDGSGDFDYW

SEQ ID NO: 48271 - protein, 16 aa, Homo sapiens
CARGPIAALGDYFDFW

SEQ ID NO: 48272 - protein, 21 aa, Homo sapiens
CARGFNRITIFGVVIKGFDYW

SEQ ID NO: 48273 - protein, 18 aa, Homo sapiens
CARGNPAAMFSMENFDYW

SEQ ID NO: 48274 - protein, 18 aa, Homo sapiens
CAREFPTFLEWLSPLDYW

SEQ ID NO: 48275 - protein, 21 aa, Homo sapiens
CARVPPFIVATIPTFGYFDYW

SEQ ID NO: 48276 - protein, 16 aa, Homo sapiens
CATSAAVVAANWFDPW

SEQ ID NO: 48277 - protein, 24 aa, Homo sapiens
CARVTGIAVAGTLLPYYYYYMDVW

SEQ ID NO: 48278 - protein, 23 aa, Homo sapiens
CAKDIYRSSSPDDYYYYYGVDVW

SEQ ID NO: 48279 - protein, 23 aa, Homo sapiens
CARARFSDYGDRKIYYYYGMDVW

SEQ ID NO: 48280 - protein, 20 aa, Homo sapiens
CARGSTTRNYGDYAYYFDYW

SEQ ID NO: 48281 - protein, 23 aa, Homo sapiens
CARDEFSRGYYYDSSGLIAFDIW

SEQ ID NO: 48282 - protein, 19 aa, Homo sapiens
CAREQYESSSWYGALFDYW

SEQ ID NO: 48283 - protein, 17 aa, Homo sapiens
CARDRRRTAIPPSPDYW

SEQ ID NO: 48284 - protein, 17 aa, Homo sapiens
CAKFLFPSGWYDEFDYW

SEQ ID NO: 48285 - protein, 19 aa, Homo sapiens
CAKDSHLGGVVITGAFDIW

SEQ ID NO: 48286 - protein, 14 aa, Homo sapiens
CVRPFDNFVTSDYW

SEQ ID NO: 48287 - protein, 18 aa, Homo sapiens
CAKGSGRVSPDSRYLDSW

SEQ ID NO: 48288 - protein, 16 aa, Homo sapiens
CAGQLERRPIGAFDLW

SEQ ID NO: 48289 - protein, 21 aa, Homo sapiens
CARGHYDFWSGYYSYNWFDPW

SEQ ID NO: 48290 - protein, 24 aa, Homo sapiens
CARGVDTAMVTDRRRHYYYYMDVW

SEQ ID NO: 48291 - protein, 22 aa, Homo sapiens
CARGFGDTIFGVVISSSWFDPW

SEQ ID NO: 48292 - protein, 14 aa, Homo sapiens
CSGGSCYSSKVDYW

SEQ ID NO: 48293 - protein, 17 aa, Homo sapiens
CARSFFNSSPVGRFDSW

SEQ ID NO: 48294 - protein, 26 aa, Homo sapiens
CARANYDFWSGYQGDHYYYYYYMDVW

SEQ ID NO: 48295 - protein, 19 aa, Homo sapiens
CAKVGPEGVAGYYYYMDVW

SEQ ID NO: 48296 - protein, 19 aa, Homo sapiens
CAIVVVPAVDYYYYGMDVW

SEQ ID NO: 48297 - protein, 22 aa, Homo sapiens
CARLAGVYCSSTSCYDGAFDYW

SEQ ID NO: 48298 - protein, 19 aa, Homo sapiens
CARGIGQWLATGLYYFDYW

SEQ ID NO: 48299 - protein, 16 aa, Homo sapiens
CAVGFGTNFAYFFDYW

SEQ ID NO: 48300 - protein, 18 aa, Homo sapiens
CARLPTLNRAIVGARDYW

SEQ ID NO: 48301 - protein, 10 aa, Homo sapiens
CASLYNFDLW

SEQ ID NO: 48302 - protein, 18 aa, Homo sapiens
CARDFPFGGNSEGDFDYW

SEQ ID NO: 48303 - protein, 18 aa, Homo sapiens
CTRVGENTVTTKNWFDPW

SEQ ID NO: 48304 - protein, 20 aa, Homo sapiens
CTTGVSYYYDSSGYYWADYW

SEQ ID NO: 48305 - protein, 19 aa, Homo sapiens
CARLSGYDMLTGYYYFDFW

SEQ ID NO: 48306 - protein, 18 aa, Homo sapiens
CARDKVSIVATIGPFDYW

SEQ ID NO: 48307 - protein, 17 aa, Homo sapiens
CAKPQIPLSSSSWFDYW

SEQ ID NO: 48308 - protein, 17 aa, Homo sapiens
CARGEAVAGTLYYFDYW

SEQ ID NO: 48309 - protein, 15 aa, Homo sapiens
CAKAEARLRGPFDYW

SEQ ID NO: 48310 - protein, 24 aa, Homo sapiens
CAADPYYYDSSGGHGNYYYYMDVW

SEQ ID NO: 48311 - protein, 22 aa, Homo sapiens
CARGEYCSGGSCGGYYYYMDVW

SEQ ID NO: 48312 - protein, 18 aa, Homo sapiens
CAKDGMSGYGDPGGFDYW

SEQ ID NO: 48313 - protein, 26 aa, Homo sapiens
CANSGYYDSSPEPRLFFLSVAYFQHW

SEQ ID NO: 48314 - protein, 18 aa, Homo sapiens
CARGRYTSGWYPDYFDYW

SEQ ID NO: 48315 - protein, 20 aa, Homo sapiens
CARDQLWFYRDYYYYGMDVW

SEQ ID NO: 48316 - protein, 15 aa, Homo sapiens
CARRYIVATREVDYW

SEQ ID NO: 48317 - protein, 22 aa, Homo sapiens
CASNLANITIFGVVIIGAFDIW

SEQ ID NO: 48318 - protein, 18 aa, Homo sapiens
CASEGYSNPYYYYGMDVW

SEQ ID NO: 48319 - protein, 21 aa, Homo sapiens
CARGAKNYYDSSGYYSWFDPW

SEQ ID NO: 48320 - protein, 16 aa, Homo sapiens
CARDLAERGVYAFDIW

SEQ ID NO: 48321 - protein, 19 aa, Homo sapiens
CARTRYGVSDSGNTWLDPW

SEQ ID NO: 48322 - protein, 17 aa, Homo sapiens
CANGGQQLVWRDAFDIW

SEQ ID NO: 48323 - protein, 19 aa, Homo sapiens
CAKGPRLLWFGELLYGDYW

SEQ ID NO: 48324 - protein, 19 aa, Homo sapiens
CARGTTLISRVVRWHFDLW

SEQ ID NO: 48325 - protein, 17 aa, Homo sapiens
CARGLVSTLYGGAFDIW

SEQ ID NO: 48326 - protein, 17 aa, Homo sapiens
CTRDNSPFPRPTDFDFW

SEQ ID NO: 48327 - protein, 23 aa, Homo sapiens
CARQGSVTYSSGWYRRGDYFDYW

SEQ ID NO: 48328 - protein, 15 aa, Homo sapiens
CARKLGGTTHAFDIW

SEQ ID NO: 48329 - protein, 18 aa, Homo sapiens
CAHRRGYSYGIWGGFDYW

SEQ ID NO: 48330 - protein, 21 aa, Homo sapiens
CARVGGVYALHTYYYYGMDVW

SEQ ID NO: 48331 - protein, 18 aa, Homo sapiens
CAREYYGSGSYEPTIDYW

SEQ ID NO: 48332 - protein, 16 aa, Homo sapiens
CARTRVILGGSYFDYW

SEQ ID NO: 48333 - protein, 23 aa, Homo sapiens
CARSRGSRIFGVVIIPVDAFDIW

SEQ ID NO: 48334 - protein, 17 aa, Homo sapiens
CARSWGSGASCYHFDYW

SEQ ID NO: 48335 - protein, 16 aa, Homo sapiens
CAKVGGYEKSSAFDMW

SEQ ID NO: 48336 - protein, 22 aa, Homo sapiens
CARATLLYYYGSGSDSWYFDLW

SEQ ID NO: 48337 - protein, 24 aa, Homo sapiens
CARDLIGAVAGLTLGYYYYGMDVW

SEQ ID NO: 48338 - protein, 19 aa, Homo sapiens
CVRGYNSGWSIHPYYFDAW

SEQ ID NO: 48339 - protein, 17 aa, Homo sapiens
CARLTVSGYGEYYFDYW

SEQ ID NO: 48340 - protein, 22 aa, Homo sapiens
CAREIGHTIFGVVIMAGPSDYW

SEQ ID NO: 48341 - protein, 21 aa, Homo sapiens
CARQNINTIFGVVIPIWFDPW

SEQ ID NO: 48342 - protein, 25 aa, Homo sapiens
CARGGEDCSSTSCYMRTPIFNFDYW

SEQ ID NO: 48343 - protein, 16 aa, Homo sapiens
CVKGRNAIAGWGFDFW

SEQ ID NO: 48344 - protein, 20 aa, Homo sapiens
CTSHTLRYSEWLLPFLFDHW

SEQ ID NO: 48345 - protein, 20 aa, Homo sapiens
CARLLDSPWGNWNDAYFDYW

SEQ ID NO: 48346 - protein, 17 aa, Homo sapiens
CARAVQWLAAYGEFDYW

SEQ ID NO: 48347 - protein, 18 aa, Homo sapiens
CARWDYHSGTYRKWFDPW

SEQ ID NO: 48348 - protein, 24 aa, Homo sapiens
CARGRRDGYTQGTHPYYYYYMDVW

SEQ ID NO: 48349 - protein, 19 aa, Homo sapiens
CTSGYSSSSGTRTYYFDYW

SEQ ID NO: 48350 - protein, 17 aa, Homo sapiens
CARASDYDSSGYYPHYW

SEQ ID NO: 48351 - protein, 13 aa, Homo sapiens
CSSHTSGSTLFVF

SEQ ID NO: 48352 - protein, 20 aa, Homo sapiens
CTTSPVILERDYYYYYMDVW

SEQ ID NO: 48353 - protein, 25 aa, Homo sapiens
CARGVDELRGVIIVVPLYYYYMDVW

SEQ ID NO: 48354 - protein, 19 aa, Homo sapiens
CARHETDTAMAYYYGMDVW

SEQ ID NO: 48355 - protein, 17 aa, Homo sapiens
CAKNVYSSSWWSPFDIW

SEQ ID NO: 48356 - protein, 14 aa, Homo sapiens
CARDSARNWIFDLW

SEQ ID NO: 48357 - protein, 21 aa, Homo sapiens
CARDRFSDWQYTTSTGAFDVW

SEQ ID NO: 48358 - protein, 18 aa, Homo sapiens
CARSAKNMAGAANWIDYW

SEQ ID NO: 48359 - protein, 19 aa, Homo sapiens
CARGRPESSSWYQDYFDYW

SEQ ID NO: 48360 - protein, 19 aa, Homo sapiens
CARIFGLADYFYFDAFDVW

SEQ ID NO: 48361 - protein, 19 aa, Homo sapiens
CARSGVGSGDYHYRIYDYW

SEQ ID NO: 48362 - protein, 16 aa, Homo sapiens
CTRDRGWTAAGYGAYW

SEQ ID NO: 48363 - protein, 15 aa, Homo sapiens
CARDRIGNGYLLDYW

SEQ ID NO: 48364 - protein, 10 aa, Homo sapiens
CMHRSNWPRF

SEQ ID NO: 48365 - protein, 18 aa, Homo sapiens
CARTHAFVVVVNWYFDLW

SEQ ID NO: 48366 - protein, 20 aa, Homo sapiens
CARGARDIVVVVAATLFDYW

SEQ ID NO: 48367 - protein, 19 aa, Homo sapiens
CARGKDEWFGGQTYYFDYW

SEQ ID NO: 48368 - protein, 15 aa, Homo sapiens
CARERGYSSSPFDPW

SEQ ID NO: 48369 - protein, 13 aa, Homo sapiens
CASGITNDAFDIW

SEQ ID NO: 48370 - protein, 17 aa, Homo sapiens
CARGPVVSSPRGAFDRW

SEQ ID NO: 48371 - protein, 15 aa, Homo sapiens
CAKASTWGRGAFDIW

SEQ ID NO: 48372 - protein, 14 aa, Homo sapiens
CAGGVMRLGDFDYW

SEQ ID NO: 48373 - protein, 17 aa, Homo sapiens
CARSSISARMTDALDSW

SEQ ID NO: 48374 - protein, 23 aa, Homo sapiens
CASDPPNSYYYDSSGYSGYFQHW

SEQ ID NO: 48375 - protein, 20 aa, Homo sapiens
CARVAKSWSSSWRSVWFDPW

SEQ ID NO: 48376 - protein, 20 aa, Homo sapiens
CARDLTVVGATEYYYGMDVW

SEQ ID NO: 48377 - protein, 23 aa, Homo sapiens
CARDSVPAYYYDSSVAGDWFDPW

SEQ ID NO: 48378 - protein, 16 aa, Homo sapiens
CAHRPGGWWSQWFDPW

SEQ ID NO: 48379 - protein, 19 aa, Homo sapiens
CARHSRYCSSYICYSYDYW

SEQ ID NO: 48380 - protein, 22 aa, Homo sapiens
CTTDLLESPYCGGDCYLPFDYW

SEQ ID NO: 48381 - protein, 20 aa, Homo sapiens
CARERFLRWNNYFYYGMDVW

SEQ ID NO: 48382 - protein, 10 aa, Homo sapiens
CTTDTILDYW

SEQ ID NO: 48383 - protein, 16 aa, Homo sapiens
CAKAHNWNYEYYFDYW

SEQ ID NO: 48384 - protein, 21 aa, Homo sapiens
CARGDYSNPSYYYYYYGMDVW

SEQ ID NO: 48385 - protein, 17 aa, Homo sapiens
CARDMVVVPAAMALDVW

SEQ ID NO: 48386 - protein, 19 aa, Homo sapiens
CASNRYYYDSSGYWSFDYW

SEQ ID NO: 48387 - protein, 19 aa, Homo sapiens
CAKGPWYSSSWYFIGLDYW

SEQ ID NO: 48388 - protein, 20 aa, Homo sapiens
CARDVYDILTGYYPYYFDYW

SEQ ID NO: 48389 - protein, 18 aa, Homo sapiens
CAKTHCGGDCYSSAFDYW

SEQ ID NO: 48390 - protein, 15 aa, Homo sapiens
CARLEGEYQLLIDYW

SEQ ID NO: 48391 - protein, 18 aa, Homo sapiens
CTRDNPDMVKAANFFDPW

SEQ ID NO: 48392 - protein, 16 aa, Homo sapiens
CAREFEWTMTTVFDYW

SEQ ID NO: 48393 - protein, 17 aa, Homo sapiens
CARDLDAVGYRKYFHPW

SEQ ID NO: 48394 - protein, 26 aa, Homo sapiens
CAKGEVQNPSITIFGLGYYYYGMDVW

SEQ ID NO: 48395 - protein, 25 aa, Homo sapiens
CTRFQLGYCSSTSCYSYYYYGMDVW

SEQ ID NO: 48396 - protein, 24 aa, Homo sapiens
CAKAGPLSDYYDSSGYYFSYFDYW

SEQ ID NO: 48397 - protein, 15 aa, Homo sapiens
CAKDEPDGYNSFDYW

SEQ ID NO: 48398 - protein, 15 aa, Homo sapiens
CARGSWIQPWGQDYW

SEQ ID NO: 48399 - protein, 17 aa, Homo sapiens
CARDADIVGVTRRFDYW

SEQ ID NO: 48400 - protein, 25 aa, Homo sapiens
CAREPHIVVVVAATPVYYYYGMDVW

SEQ ID NO: 48401 - protein, 14 aa, Homo sapiens
CATKSPSLNYFESW

SEQ ID NO: 48402 - protein, 22 aa, Homo sapiens
CARVRGGYGGNTGWGFWSFDLW

SEQ ID NO: 48403 - protein, 20 aa, Homo sapiens
CAKDVAPYSSGWYASGPDYW

SEQ ID NO: 48404 - protein, 19 aa, Homo sapiens
CAISSYDDLTGGPNWFDPW

SEQ ID NO: 48405 - protein, 18 aa, Homo sapiens
CARDYYDSSEAKDAFDIW

SEQ ID NO: 48406 - protein, 16 aa, Homo sapiens
CTTELIWVGDQLGDYW

SEQ ID NO: 48407 - protein, 21 aa, Homo sapiens
CAIQFSMVRGVILHYYYMDVW

SEQ ID NO: 48408 - protein, 17 aa, Homo sapiens
CARFDLWFGAPDYFDYW

SEQ ID NO: 48409 - protein, 17 aa, Homo sapiens
CAKEGGVQLGLGSFDYW

SEQ ID NO: 48410 - protein, 17 aa, Homo sapiens
CAKDTGQLWWVGWFDPW

SEQ ID NO: 48411 - protein, 20 aa, Homo sapiens
CVRTTSTVTTGYYYYAMDVW

SEQ ID NO: 48412 - protein, 19 aa, Homo sapiens
CARELTTPSEYYYYYMDVW

SEQ ID NO: 48413 - protein, 25 aa, Homo sapiens
CVRERAPGGFCSSGTCKKSFEFDSW

SEQ ID NO: 48414 - protein, 19 aa, Homo sapiens
CAKDGDCGGDCYRGALDYW

SEQ ID NO: 48415 - protein, 19 aa, Homo sapiens
CARDHRVDYGGNDDAFDVW

SEQ ID NO: 48416 - protein, 24 aa, Homo sapiens
CAKNQGEGYCSSGLCYPENAFDVW

SEQ ID NO: 48417 - protein, 12 aa, Homo sapiens
CQKSYSTPSWKF

SEQ ID NO: 48418 - protein, 19 aa, Homo sapiens
CARDTHSSSWYRAKHIDYW

SEQ ID NO: 48419 - protein, 22 aa, Homo sapiens
CARNAPITIFGVVIIADAFDIW

SEQ ID NO: 48420 - protein, 13 aa, Homo sapiens
CSVRGVRNYFDYW

SEQ ID NO: 48421 - protein, 19 aa, Homo sapiens
CARTSYDILTGWLGGFDPW

SEQ ID NO: 48422 - protein, 20 aa, Homo sapiens
CARARPRFLLRFLEWLPDYW

SEQ ID NO: 48423 - protein, 18 aa, Homo sapiens
CASGQTTVTYYYYYMDVW

SEQ ID NO: 48424 - protein, 21 aa, Homo sapiens
CARCPIYCTGGVCYFFWFDPW

SEQ ID NO: 48425 - protein, 20 aa, Homo sapiens
CTTRYCGGGTCNPLGAFDLW

SEQ ID NO: 48426 - protein, 13 aa, Homo sapiens
CARRGPYGAADYW

SEQ ID NO: 48427 - protein, 18 aa, Homo sapiens
CAKEYSSSWRHYYYMDVW

SEQ ID NO: 48428 - protein, 22 aa, Homo sapiens
CARVIRHNYYDSSAYRHAFDVW

SEQ ID NO: 48429 - protein, 24 aa, Homo sapiens
CARNPLLWFGELLFQYYYYYMDVW

SEQ ID NO: 48430 - protein, 22 aa, Homo sapiens
CARGGGYDILTGYKYYYGMDVW

SEQ ID NO: 48431 - protein, 17 aa, Homo sapiens
CVKANDPLSFVDYFDYW

SEQ ID NO: 48432 - protein, 17 aa, Homo sapiens
CARDWSVYGSGSYFPVW

SEQ ID NO: 48433 - protein, 18 aa, Homo sapiens
CARVWDTAMDPKSWFDPW

SEQ ID NO: 48434 - protein, 16 aa, Homo sapiens
CARDLGFAAVDNFDVW

SEQ ID NO: 48435 - protein, 17 aa, Homo sapiens
CARLGRQLVPTEYFQHW

SEQ ID NO: 48436 - protein, 16 aa, Homo sapiens
CARQSYYESSTNFDYW

SEQ ID NO: 48437 - protein, 22 aa, Homo sapiens
CAKDGSDYDFWSGYPPVWFDPW

SEQ ID NO: 48438 - protein, 16 aa, Homo sapiens
CANGGYSYGRNWFDPW

SEQ ID NO: 48439 - protein, 14 aa, Homo sapiens
CARYDYGDAHFDYW

SEQ ID NO: 48440 - protein, 20 aa, Homo sapiens
CARVPGSFGVVIDPGWFDPW

SEQ ID NO: 48441 - protein, 14 aa, Homo sapiens
CAKDPRGSSGYFYW

SEQ ID NO: 48442 - protein, 25 aa, Homo sapiens
CSREGRITVIVVVFTEFGHDGFDVW

SEQ ID NO: 48443 - protein, 24 aa, Homo sapiens
CAHRPGFYDSRGYYTEDNDAFDIW

SEQ ID NO: 48444 - protein, 26 aa, Homo sapiens
CARGIYLGSYYYDSSGYYALGGFDYW

SEQ ID NO: 48445 - protein, 15 aa, Homo sapiens
CARIDWFLNVWFDPW

SEQ ID NO: 48446 - protein, 21 aa, Homo sapiens
CARSSGHSYVPFRPYYYMDVW

SEQ ID NO: 48447 - protein, 20 aa, Homo sapiens
CAGGVSDSYGTSVSWGADYW

SEQ ID NO: 48448 - protein, 20 aa, Homo sapiens
CTRERGYSDYGPYYYGMDVW

SEQ ID NO: 48449 - protein, 19 aa, Homo sapiens
CATGRAPGIQLWKGVFDYW

SEQ ID NO: 48450 - protein, 19 aa, Homo sapiens
CATEFAYCGGDCYSPFDYW

SEQ ID NO: 48451 - protein, 12 aa, Homo sapiens
CASQQVGATDYW

SEQ ID NO: 48452 - protein, 24 aa, Homo sapiens
CTRGLEAYCGGDCSDYYYYGMDVW

SEQ ID NO: 48453 - protein, 14 aa, Homo sapiens
CTRVGTTTYPFDYW

SEQ ID NO: 48454 - protein, 19 aa, Homo sapiens
CARGGEYYDSSGPLTKDYW

SEQ ID NO: 48455 - protein, 24 aa, Homo sapiens
CARFSIKITMIVVVMTQNDAFDIW

SEQ ID NO: 48456 - protein, 18 aa, Homo sapiens
CARRSRGSGWILGWFDYW

SEQ ID NO: 48457 - protein, 25 aa, Homo sapiens
CARGKMGTTVTTLSHLYYYYGMDVW

SEQ ID NO: 48458 - protein, 18 aa, Homo sapiens
CARVIAVAGTLHDAFDIW

SEQ ID NO: 48459 - protein, 20 aa, Homo sapiens
CARDTLTSSRDGYNSAFDIW

SEQ ID NO: 48460 - protein, 24 aa, Homo sapiens
CARVQYYGSGSPFSPYYYYGMDVW

SEQ ID NO: 48461 - protein, 22 aa, Homo sapiens
CARGWDCSSTSCYPRRRSLDYW

SEQ ID NO: 48462 - protein, 18 aa, Homo sapiens
CAKDPGLITIFDCYFDYW

SEQ ID NO: 48463 - protein, 27 aa, Homo sapiens
CARRFSHPYCTGGVCYTSFLGNWFDPW

SEQ ID NO: 48464 - protein, 16 aa, Homo sapiens
CARDWGMGQLDAFDIW

SEQ ID NO: 48465 - protein, 13 aa, Homo sapiens
CARDPDDWYFDIW

SEQ ID NO: 48466 - protein, 19 aa, Homo sapiens
CARDKRTFQGFYYYGMDVW

SEQ ID NO: 48467 - protein, 25 aa, Homo sapiens
CARWGTYCTGGVCYPDYYYYYMDVW

SEQ ID NO: 48468 - protein, 28 aa, Homo sapiens
CARAGDCTGGVCYTDRGYSSSWYGLDYW

SEQ ID NO: 48469 - protein, 21 aa, Homo sapiens
CARAPGVDTAMVAYYYGMDVW

SEQ ID NO: 48470 - protein, 23 aa, Homo sapiens
CARDSRSIAAAGTAYYYYYMDVW

SEQ ID NO: 48471 - protein, 21 aa, Homo sapiens
CARDGLLEQRAYHSYYYMDVW

SEQ ID NO: 48472 - protein, 24 aa, Homo sapiens
CARDPLEYCSGGSCRYYYYGMDVW

SEQ ID NO: 48473 - protein, 19 aa, Homo sapiens
CARGHARYSYGAHGAFDVW

SEQ ID NO: 48474 - protein, 11 aa, Homo sapiens
CARGLNEGDYW

SEQ ID NO: 48475 - protein, 24 aa, Homo sapiens
CARPSSPNYHGSGTYYNDWYFDFW

SEQ ID NO: 48476 - protein, 16 aa, Homo sapiens
CARGVYGSGTFYCDFW

SEQ ID NO: 48477 - protein, 16 aa, Homo sapiens
CAHRPSGYDGAYFDYW

SEQ ID NO: 48478 - protein, 14 aa, Homo sapiens
CARTYGRNSFDDYW

SEQ ID NO: 48479 - protein, 15 aa, Homo sapiens
CTKERSGSYHPGDYW

SEQ ID NO: 48480 - protein, 27 aa, Homo sapiens
CARDQLFIVVVPDTTLLGNYYYGMDVW

SEQ ID NO: 48481 - protein, 24 aa, Homo sapiens
CARGNHMVRGAHDRIYYYYYMDVW

SEQ ID NO: 48482 - protein, 16 aa, Homo sapiens
CASPNDYGDYARFDYW

SEQ ID NO: 48483 - protein, 19 aa, Homo sapiens
CAKDPGNGVVGATGYFDYW

SEQ ID NO: 48484 - protein, 16 aa, Homo sapiens
CAPYSNYYYYYGMDVW

SEQ ID NO: 48485 - protein, 22 aa, Homo sapiens
CATEDLYYDDRIGYYPGAFDIW

SEQ ID NO: 48486 - protein, 15 aa, Homo sapiens
CVRRTVGARGWFDPW

SEQ ID NO: 48487 - protein, 19 aa, Homo sapiens
CAKDMEAAGNYYYYGMDVW

SEQ ID NO: 48488 - protein, 20 aa, Homo sapiens
CARGIGDIGYSSGWFYFDYW

SEQ ID NO: 48489 - protein, 22 aa, Homo sapiens
CARENVLRYFDWLFQSWHFDYW

SEQ ID NO: 48490 - protein, 15 aa, Homo sapiens
CAKGVGATRYSSDYW

SEQ ID NO: 48491 - protein, 21 aa, Homo sapiens
CARAAVLARWLPNRGIYFGSW

SEQ ID NO: 48492 - protein, 24 aa, Homo sapiens
CARAVQTTVVTPAKYYYYYYMDVW

SEQ ID NO: 48493 - protein, 26 aa, Homo sapiens
CARGSPTRIDWLFNTINYYYYGMDVW

SEQ ID NO: 48494 - protein, 22 aa, Homo sapiens
CAKESRLLGRASRYYYFGMDVW

SEQ ID NO: 48495 - protein, 21 aa, Homo sapiens
CARDRPGYYDSSGLGWYFDLW

SEQ ID NO: 48496 - protein, 18 aa, Homo sapiens
CARGHLFGVVKEHWFDPW

SEQ ID NO: 48497 - protein, 22 aa, Homo sapiens
CARHSGPSMIVVVILAGWFDPW

SEQ ID NO: 48498 - protein, 17 aa, Homo sapiens
CTRLGWDGTSTIYFDYW

SEQ ID NO: 48499 - protein, 22 aa, Homo sapiens
CARWGAAMTGYFSPPTYYFDYW

SEQ ID NO: 48500 - protein, 18 aa, Homo sapiens
CAREGSGDGYYYYGMDVW

SEQ ID NO: 48501 - protein, 19 aa, Homo sapiens
CAKDIRVDILTGLHPFDYW

SEQ ID NO: 48502 - protein, 23 aa, Homo sapiens
CARTRWYYDSSGYPKAYEYFQHW

SEQ ID NO: 48503 - protein, 15 aa, Homo sapiens
CAADSSGYSNWFDPW

SEQ ID NO: 48504 - protein, 19 aa, Homo sapiens
CAGQLVGTGRNYYPAMDVW

SEQ ID NO: 48505 - protein, 13 aa, Homo sapiens
CAISGGDGYNGYW

SEQ ID NO: 48506 - protein, 18 aa, Homo sapiens
CTRDLRIGSIFVSEVDYW

SEQ ID NO: 48507 - protein, 20 aa, Homo sapiens
CARSDTAMAPYYYYYYMDVW

SEQ ID NO: 48508 - protein, 19 aa, Homo sapiens
CARGETAIFGVVISHFDYW

SEQ ID NO: 48509 - protein, 21 aa, Homo sapiens
CARGWWYGDYLLPSGLHFDYW

SEQ ID NO: 48510 - protein, 17 aa, Homo sapiens
CARDSWSGYDSDGFDLW

SEQ ID NO: 48511 - protein, 16 aa, Homo sapiens
CASGGYSSSWRVFDYW

SEQ ID NO: 48512 - protein, 21 aa, Homo sapiens
CAREGEGYDFWSGYPAAFDYW

SEQ ID NO: 48513 - protein, 14 aa, Homo sapiens
CAHRQFLRQAFDIW

SEQ ID NO: 48514 - protein, 21 aa, Homo sapiens
CARHSITMIVVVKVPNWFDPW

SEQ ID NO: 48515 - protein, 18 aa, Homo sapiens
CARHMVGATPGRDYYDYW

SEQ ID NO: 48516 - protein, 16 aa, Homo sapiens
CAKDIVSSMTSGSDYW

SEQ ID NO: 48517 - protein, 23 aa, Homo sapiens
CARDAVWDYYDSSGYSDDAFDIW

SEQ ID NO: 48518 - protein, 25 aa, Homo sapiens
CAKSWEDSIMITFGGVIVSPIFDYW

SEQ ID NO: 48519 - protein, 19 aa, Homo sapiens
CARPRGGGYSTSSGDLDYW

SEQ ID NO: 48520 - protein, 31 aa, Homo sapiens
CARAPSYNWNYRDIMITFGGVIVSTWYFDYW

SEQ ID NO: 48521 - protein, 17 aa, Homo sapiens
CARQKYASSRHQEEDYW

SEQ ID NO: 48522 - protein, 16 aa, Homo sapiens
CARDPRGTFYGYFDSW

SEQ ID NO: 48523 - protein, 17 aa, Homo sapiens
CARSAHSGYDLWAFDYW

SEQ ID NO: 48524 - protein, 15 aa, Homo sapiens
CARSARVGLSYSDYW

SEQ ID NO: 48525 - protein, 18 aa, Homo sapiens
CARGFMSYYDSSGGIDYW

SEQ ID NO: 48526 - protein, 24 aa, Homo sapiens
CAKVAQENVLLWFGELYYYGMDVW

SEQ ID NO: 48527 - protein, 21 aa, Homo sapiens
CAKRPLAYCGGDCYSSGFDYW

SEQ ID NO: 48528 - protein, 24 aa, Homo sapiens
CARGGVERDIVLVVYEVGYYFDYW

SEQ ID NO: 48529 - protein, 13 aa, Homo sapiens
CARPHFYGDLDYW

SEQ ID NO: 48530 - protein, 12 aa, Homo sapiens
CATDPGDGPDYW

SEQ ID NO: 48531 - protein, 18 aa, Homo sapiens
CAKELLYYYGPGSYNDYW

SEQ ID NO: 48532 - protein, 21 aa, Homo sapiens
CARASMATSRYYYYYYYMDVW

SEQ ID NO: 48533 - protein, 26 aa, Homo sapiens
CARLKRITIFGVVIIVEKRGWYFDYW

SEQ ID NO: 48534 - protein, 19 aa, Homo sapiens
CAHKGWFPSPLQGHYFDYW

SEQ ID NO: 48535 - protein, 16 aa, Homo sapiens
CAKGHAADNTRYFEHW

SEQ ID NO: 48536 - protein, 24 aa, Homo sapiens
CARDQGEAECRGGSCYPENAFDIW

SEQ ID NO: 48537 - protein, 19 aa, Homo sapiens
CARDNHYYSSGNYHPADYW

SEQ ID NO: 48538 - protein, 19 aa, Homo sapiens
CAKDTPGWSWSGYYRFDPW

SEQ ID NO: 48539 - protein, 17 aa, Homo sapiens
CAGYYDYVWGSYRPDYW

SEQ ID NO: 48540 - protein, 16 aa, Homo sapiens
CARGVGTSAGTFFDHW

SEQ ID NO: 48541 - protein, 25 aa, Homo sapiens
CARGDFWSGPWVSMGEGYYYYMDVW

SEQ ID NO: 48542 - protein, 15 aa, Homo sapiens
CATGYRNSWFSFDYW

SEQ ID NO: 48543 - protein, 20 aa, Homo sapiens
CARDESITMIVPEVGAFDIW

SEQ ID NO: 48544 - protein, 18 aa, Homo sapiens
CARLPLWYYYDSSGFDYW

SEQ ID NO: 48545 - protein, 17 aa, Homo sapiens
CAKGTVPIAVAGTVDYW

SEQ ID NO: 48546 - protein, 13 aa, Homo sapiens
CQYRSNRPPEITF

SEQ ID NO: 48547 - protein, 17 aa, Homo sapiens
CARDNSVGFGELDFDYW

SEQ ID NO: 48548 - protein, 14 aa, Homo sapiens
CARGQGWLSELDYW

SEQ ID NO: 48549 - protein, 15 aa, Homo sapiens
CARDGRQWLVGIDYW

SEQ ID NO: 48550 - protein, 16 aa, Homo sapiens
CATEAITFGGVTIDYW

SEQ ID NO: 48551 - protein, 17 aa, Homo sapiens
CALPICDYYYYYYMDVW

SEQ ID NO: 48552 - protein, 15 aa, Homo sapiens
CAHYSYGTSRYFDYW

SEQ ID NO: 48553 - protein, 24 aa, Homo sapiens
CAKDRGATIFGVVSPAGYYYMDVW

SEQ ID NO: 48554 - protein, 20 aa, Homo sapiens
CAKAPSYDFWGGVSYYFDYW

SEQ ID NO: 48555 - protein, 19 aa, Homo sapiens
CATDTIAVAGRSPNAFDIW

SEQ ID NO: 48556 - protein, 15 aa, Homo sapiens
CVRRSGWLVMGFDYW

SEQ ID NO: 48557 - protein, 18 aa, Homo sapiens
CVKAVQSSSAASADFDYW

SEQ ID NO: 48558 - protein, 22 aa, Homo sapiens
CASQIVVVPAAISYYYYGMDVW

SEQ ID NO: 48559 - protein, 22 aa, Homo sapiens
CAREVNYYGSGENSGGDGMDVW

SEQ ID NO: 48560 - protein, 17 aa, Homo sapiens
CARPRGERGYSYGIDYW

SEQ ID NO: 48561 - protein, 23 aa, Homo sapiens
CARGLLSSGYYSAISEVGAFDIW

SEQ ID NO: 48562 - protein, 27 aa, Homo sapiens
CARISLRDYDFWSGYYTDNYYYGMDVW

SEQ ID NO: 48563 - protein, 14 aa, Homo sapiens
CAKFRVVTAYLDYW

SEQ ID NO: 48564 - protein, 17 aa, Homo sapiens
CARDAVGATHPHAFDIW

SEQ ID NO: 48565 - protein, 26 aa, Homo sapiens
CASRYYYDSSGYYQGYYYYYYYMDVW

SEQ ID NO: 48566 - protein, 24 aa, Homo sapiens
CARDREVNYFDTSGYYFTDAFDIW

SEQ ID NO: 48567 - protein, 16 aa, Homo sapiens
CAKGGLMTPVSFFDYW

SEQ ID NO: 48568 - protein, 20 aa, Homo sapiens
CASSYDRRGYGLGPDAFDLW

SEQ ID NO: 48569 - protein, 18 aa, Homo sapiens
CARDTGDYYDESGYNDYW

SEQ ID NO: 48570 - protein, 22 aa, Homo sapiens
CAKDKGDGYDSSGSGFNWFDPW

SEQ ID NO: 48571 - protein, 8 aa, Homo sapiens [sequence omitted]

SEQ ID NO: 48572 - protein, 23 aa, Homo sapiens
CARFAYYYDRSGYIGGLYYMDVW

SEQ ID NO: 48573 - protein, 27 aa, Homo sapiens
CAKGPSPYYYDSSGYFLPGTGVAFDIW

SEQ ID NO: 48574 - protein, 21 aa, Homo sapiens
CARDHGEMVRGVYYYYGMDVW

SEQ ID NO: 48575 - protein, 17 aa, Homo sapiens
CARGDSSGWKDWYFDLW

SEQ ID NO: 48576 - protein, 16 aa, Homo sapiens
CARHPGGAMGAQLDYW

SEQ ID NO: 48577 - protein, 13 aa, Homo sapiens
CTRGGRYPSPDYW

SEQ ID NO: 48578 - protein, 23 aa, Homo sapiens
CASRPSHDFWSGYYYYYYYMDVW

SEQ ID NO: 48579 - protein, 22 aa, Homo sapiens
CAREDYYDSGSLGSYYYGMDVW

SEQ ID NO: 48580 - protein, 19 aa, Homo sapiens
CNTRGPGLGKWRGLYFDYW

SEQ ID NO: 48581 - protein, 15 aa, Homo sapiens
CVHRPRTTVYYFDYW

SEQ ID NO: 48582 - protein, 16 aa, Homo sapiens
CARDFGDPANPCFDPW

SEQ ID NO: 48583 - protein, 15 aa, Homo sapiens
CATLGMTTVTGFDYW

SEQ ID NO: 48584 - protein, 25 aa, Homo sapiens
CARLGYCSGGSCYSMAKSMYYFDYW

SEQ ID NO: 48585 - protein, 18 aa, Homo sapiens
CASAQTGTGYYYYGMDVW

SEQ ID NO: 48586 - protein, 24 aa, Homo sapiens
CARAIVGNTFHYDSSGYYTHFDYW

SEQ ID NO: 48587 - protein, 24 aa, Homo sapiens
CARPSKTPTPGSQQGQVLPYFEYW

SEQ ID NO: 48588 - protein, 23 aa, Homo sapiens
CARVRARYFDWFADYYYYYMDVW

SEQ ID NO: 48589 - protein, 22 aa, Homo sapiens
CAGLRFLEWLSQVYYYYGMDVW

SEQ ID NO: 48590 - protein, 15 aa, Homo sapiens
CARDSLEWLDAFDIW

SEQ ID NO: 48591 - protein, 18 aa, Homo sapiens
CARDCSGTLCLSPIFDLW

SEQ ID NO: 48592 - protein, 19 aa, Homo sapiens
CARDIPLSSGDYGDKFDYW

SEQ ID NO: 48593 - protein, 15 aa, Homo sapiens
CSGGSCYAGSWFDPW

SEQ ID NO: 48594 - protein, 14 aa, Homo sapiens
CARDRSLSKRWDYW

SEQ ID NO: 48595 - protein, 17 aa, Homo sapiens
CAKDIGRVATVTILDYW

SEQ ID NO: 48596 - protein, 21 aa, Homo sapiens
CARIQVESVPLGYYYYYMDVW

SEQ ID NO: 48597 - protein, 21 aa, Homo sapiens
CARHALGAQWEHSRRPYFAFW

SEQ ID NO: 48598 - protein, 18 aa, Homo sapiens
CARETVDASGTWDRFDPW

SEQ ID NO: 48599 - protein, 18 aa, Homo sapiens
CARYCSSTSCYAYSFDYW

SEQ ID NO: 48600 - protein, 19 aa, Homo sapiens
CARGLGYYSSTSHYPPDYW

SEQ ID NO: 48601 - protein, 19 aa, Homo sapiens
CARLAQATVTTDGGWFDPW

SEQ ID NO: 48602 - protein, 26 aa, Homo sapiens
CAKDLERVDIWRQWIDMVTGWWFDPW

SEQ ID NO: 48603 - protein, 10 aa, Homo sapiens
CACPGSYFDW

SEQ ID NO: 48604 - protein, 11 aa, Homo sapiens
CQAWHTSTAVF

SEQ ID NO: 48605 - protein, 19 aa, Homo sapiens
CARGVDTAMIMGLYYFHYW

SEQ ID NO: 48606 - protein, 20 aa, Homo sapiens
CAKDPHHTIFGVVIHYFDYW

SEQ ID NO: 48607 - protein, 19 aa, Homo sapiens
CARETISSAHEFTGPFDFW

SEQ ID NO: 48608 - protein, 28 aa, Homo sapiens
CARVASTVLGVIAWGPKSLPQYYYMDVW

SEQ ID NO: 48609 - protein, 20 aa, Homo sapiens
CAKDNYERPMWLRDDAFDIW

SEQ ID NO: 48610 - protein, 16 aa, Homo sapiens
CARHPIIMIPSYFDYW

SEQ ID NO: 48611 - protein, 21 aa, Homo sapiens
CARGVGDTIFGVVIIGAFDIW

SEQ ID NO: 48612 - protein, 18 aa, Homo sapiens
CARDLSLASTWYYYVDVW

SEQ ID NO: 48613 - protein, 18 aa, Homo sapiens
CARGMVGQWLVPGYFDYW

SEQ ID NO: 48614 - protein, 21 aa, Homo sapiens
CARGIPENDDYYDSSGYYGYW

SEQ ID NO: 48615 - protein, 16 aa, Homo sapiens
CARDPDSGTYYVFDSW

SEQ ID NO: 48616 - protein, 18 aa, Homo sapiens
CARGYYYDSSGSEAFDIW

SEQ ID NO: 48617 - protein, 19 aa, Homo sapiens
CAKDPPLMTTVTSDAFDIW

SEQ ID NO: 48618 - protein, 16 aa, Homo sapiens
CASHYCSGGSCPLDYW

SEQ ID NO: 48619 - protein, 22 aa, Homo sapiens
CARSGFDFSSGYSDHYYYMDVW

SEQ ID NO: 48620 - protein, 21 aa, Homo sapiens
CARVDSRITIFGVREYYFDYW

SEQ ID NO: 48621 - protein, 17 aa, Homo sapiens
CAVTDAGTTGGVWFDPW

SEQ ID NO: 48622 - protein, 20 aa, Homo sapiens
CARDRYYYDSSPPEGYFDYW

SEQ ID NO: 48623 - protein, 19 aa, Homo sapiens
CARDGYREGLYYYYYMDVW

SEQ ID NO: 48624 - protein, 23 aa, Homo sapiens
CARGREYYDILTGYYGPYYFDYW

SEQ ID NO: 48625 - protein, 14 aa, Homo sapiens
CAIRPRRQRQFDFW

SEQ ID NO: 48626 - protein, 23 aa, Homo sapiens
CAKDSPSVYDSSGYLVGDYYDYW

SEQ ID NO: 48627 - protein, 20 aa, Homo sapiens
CAKDITGTTSLNYYYYMDVW

SEQ ID NO: 48628 - protein, 19 aa, Homo sapiens
CTTDLIEGIQLWLRAFDIW

SEQ ID NO: 48629 - protein, 16 aa, Homo sapiens
CARDLDYVFFDWFDPW

SEQ ID NO: 48630 - protein, 19 aa, Homo sapiens
CTSQWPAAMSYYYYGMDVW

SEQ ID NO: 48631 - protein, 22 aa, Homo sapiens
CATAVVVVAATRVYYYYGMDVW

SEQ ID NO: 48632 - protein, 26 aa, Homo sapiens
CARQGSGEITIFGVVINPYYYGMDVW

SEQ ID NO: 48633 - protein, 15 aa, Homo sapiens
CAKFQEGPQLVQDYW

SEQ ID NO: 48634 - protein, 16 aa, Homo sapiens
CARVLGDYGEPMVDYW

SEQ ID NO: 48635 - protein, 28 aa, Homo sapiens
CARDPLGSYSSGYYYRFLSARHDAFDIW

SEQ ID NO: 48636 - protein, 15 aa, Homo sapiens
CGLDDGDYGPPFDPW

SEQ ID NO: 48637 - protein, 24 aa, Homo sapiens
CAKVTSPNYYGSGTYYKDWYFDFW

SEQ ID NO: 48638 - protein, 32 aa, Homo sapiens
CALPISGDTAVYYCAKQGGYFALERYSYMDVW

SEQ ID NO: 48639 - protein, 26 aa, Homo sapiens
CARDSLLRYFDWSPLGKTYYYGMDVW

SEQ ID NO: 48640 - protein, 19 aa, Homo sapiens
CARDVPIEVPGTIHTFDIW

SEQ ID NO: 48641 - protein, 14 aa, Homo sapiens
CSVWSGYPIPFDYW

SEQ ID NO: 48642 - protein, 15 aa, Homo sapiens
CAKQDESSSWSFDYW

SEQ ID NO: 48643 - protein, 24 aa, Homo sapiens
CARDRQGWGLITFGGVIVPENDYW

SEQ ID NO: 48644 - protein, 16 aa, Homo sapiens
CARDNSGWRQDAFDIW

SEQ ID NO: 48645 - protein, 22 aa, Homo sapiens
CARVSDTAMVYSEWGYNWFDPW

SEQ ID NO: 48646 - protein, 19 aa, Homo sapiens
CARDKYESGITGTQGFDYW

SEQ ID NO: 48647 - protein, 20 aa, Homo sapiens
CARANWNYQYYYYYYYMDVW

SEQ ID NO: 48648 - protein, 19 aa, Homo sapiens
CARLSTTVTTYGRWYFDLW

SEQ ID NO: 48649 - protein, 18 aa, Homo sapiens
CAKKGDSYGYHNSYFDYW

SEQ ID NO: 48650 - protein, 15 aa, Homo sapiens
CARDRGSGWYQGDYW

SEQ ID NO: 48651 - protein, 23 aa, Homo sapiens
CARDRQTYYDFWSGYSPNWFDPW

SEQ ID NO: 48652 - protein, 21 aa, Homo sapiens
CAHGTYYDFWSGFPLNWFDPW

SEQ ID NO: 48653 - protein, 20 aa, Homo sapiens
CAKDLVGWYELNYNFAMDVW

SEQ ID NO: 48654 - protein, 20 aa, Homo sapiens
CAKIPSGYDWDYYYYYMDVW

SEQ ID NO: 48655 - protein, 17 aa, Homo sapiens
CARVFGDPDEGYYFDYW

SEQ ID NO: 48656 - protein, 18 aa, Homo sapiens
CARGHSLEWLSQGAFDIW

SEQ ID NO: 48657 - protein, 17 aa, Homo sapiens
CAKDSTSAYSSSPGDYW

SEQ ID NO: 48658 - protein, 19 aa, Homo sapiens
CAKVNSVYNWNYAVWIDYW

SEQ ID NO: 48659 - protein, 23 aa, Homo sapiens
CARVRRFRDHYYDSRTQYYFDYW

SEQ ID NO: 48660 - protein, 15 aa, Homo sapiens
CATSGDGDSSDFDYW

SEQ ID NO: 48661 - protein, 22 aa, Homo sapiens
CARDRGVVVTAIAMGNNWFDPW

SEQ ID NO: 48662 - protein, 13 aa, Homo sapiens
CAKYLSYGGPDYW

SEQ ID NO: 48663 - protein, 16 aa, Homo sapiens
CARHRTVTTLGPFDFW

SEQ ID NO: 48664 - protein, 18 aa, Homo sapiens
CAKGPGYSSGWYEGIDYW

SEQ ID NO: 48665 - protein, 21 aa, Homo sapiens
CAREGLGYCSSTSCYSAFDIW

SEQ ID NO: 48666 - protein, 19 aa, Homo sapiens
CARVRYYYDSSGLDYFDYW

SEQ ID NO: 48667 - protein, 27 aa, Homo sapiens
CARDVRGTLGTFSTPLTVYYYYYLDVW

SEQ ID NO: 48668 - protein, 19 aa, Homo sapiens
CARGSRYDFWSGYKDVDYW

SEQ ID NO: 48669 - protein, 15 aa, Homo sapiens
CAKDSRQRLADFDYW

SEQ ID NO: 48670 - protein, 15 aa, Homo sapiens
CARRVRSDYPLFDYW

SEQ ID NO: 48671 - protein, 22 aa, Homo sapiens
CARERRITIFGVVISGGYMDVW

SEQ ID NO: 48672 - protein, 21 aa, Homo sapiens
CARVPLIAVAGYYYYYGMDVW

SEQ ID NO: 48673 - protein, 18 aa, Homo sapiens
CARLMDTARDYYYGMDVW

SEQ ID NO: 48674 - protein, 19 aa, Homo sapiens
CAKEFGSGWLRGGYYFDNW

SEQ ID NO: 48675 - protein, 16 aa, Homo sapiens
CARVIVGATSWEFDYW

SEQ ID NO: 48676 - protein, 26 aa, Homo sapiens
CARETYYYDSSGYYYPLRDPYYFDYW

SEQ ID NO: 48677 - protein, 17 aa, Homo sapiens
CAKTSLVYTWSEAMDYW

SEQ ID NO: 48678 - protein, 21 aa, Homo sapiens
CAREGILITIFGVARDAFDIW

SEQ ID NO: 48679 - protein, 24 aa, Homo sapiens
CARQLRGSSWYLDPYYYYYYMDVW

SEQ ID NO: 48680 - protein, 20 aa, Homo sapiens
CAKGSLGHCSGTVCYPFDSW

SEQ ID NO: 48681 - protein, 17 aa, Homo sapiens
CAKGPDLAPNAIYFDYW

SEQ ID NO: 48682 - protein, 16 aa, Homo sapiens
CASQTTGSTWYYMDVW

SEQ ID NO: 48683 - protein, 18 aa, Homo sapiens
CARVGFWPSIGDDAFDIW

SEQ ID NO: 48684 - protein, 25 aa, Homo sapiens
CAREPHFDFWSGIFSGHYGYYLDYW

SEQ ID NO: 48685 - protein, 15 aa, Homo sapiens
CAKGGFTTNTAFDIW

SEQ ID NO: 48686 - protein, 24 aa, Homo sapiens
CAREKMATIYLGDGYYYYYGMDVW

SEQ ID NO: 48687 - protein, 20 aa, Homo sapiens
CARVNQGWEDSVDQYYFDYW

SEQ ID NO: 48688 - protein, 20 aa, Homo sapiens
CARCRGYFDWLLFDLYFDYW

SEQ ID NO: 48689 - protein, 16 aa, Homo sapiens
CAGPISSSSFLLADYW

SEQ ID NO: 48690 - protein, 14 aa, Homo sapiens
CAKLSDYVGTSDYW

SEQ ID NO: 48691 - protein, 16 aa, Homo sapiens
CARARRDGNGPIFDYW

SEQ ID NO: 48692 - protein, 19 aa, Homo sapiens
CAREGSGQWLVLRPRFDYW

SEQ ID NO: 48693 - protein, 17 aa, Homo sapiens
CARVVGDDYGDQLFDYW

SEQ ID NO: 48694 - protein, 17 aa, Homo sapiens
CAKDLFGLEHWLVFDSW

SEQ ID NO: 48695 - protein, 22 aa, Homo sapiens
CARDKPEYYSNYVYYYYGMDVW

SEQ ID NO: 48696 - protein, 16 aa, Homo sapiens
CARVWLYFGKYYFDYW

SEQ ID NO: 48697 - protein, 16 aa, Homo sapiens
CARLAGYSRYRLFDPW

SEQ ID NO: 48698 - protein, 21 aa, Homo sapiens
CARDEKYFDFWSGYLGDFDHW

SEQ ID NO: 48699 - protein, 20 aa, Homo sapiens
CARHLTPGLGDSGDYDADYW

SEQ ID NO: 48700 - protein, 16 aa, Homo sapiens
CARIGDLPPDYYMDVW

SEQ ID NO: 48701 - protein, 20 aa, Homo sapiens
CARGGRVLRFLEWPGPPDYW

SEQ ID NO: 48702 - protein, 19 aa, Homo sapiens
CARQPWIQLWLRDCYFDYW

SEQ ID NO: 48703 - protein, 14 aa, Homo sapiens
CFVYSSGWYYMDVW

SEQ ID NO: 48704 - protein, 17 aa, Homo sapiens
CARYWPISEVNDAFDIW

SEQ ID NO: 48705 - protein, 19 aa, Homo sapiens
CARTLMVTSLYYYYGLDVW

SEQ ID NO: 48706 - protein, 15 aa, Homo sapiens
CARGYFSSPLWFDWW

SEQ ID NO: 48707 - protein, 20 aa, Homo sapiens
CARDRLGYCSGGSCYQFSYW

SEQ ID NO: 48708 - protein, 22 aa, Homo sapiens
CAKTNYYDSSGYYYGGGYFDYW

SEQ ID NO: 48709 - protein, 20 aa, Homo sapiens
CAKLPLSYSSSWYYVDFDYW

SEQ ID NO: 48710 - protein, 21 aa, Homo sapiens
CARHVRPFIRYFDWLSYFDYW

SEQ ID NO: 48711 - protein, 15 aa, Homo sapiens
CTRVAIGNYGRFDIW

SEQ ID NO: 48712 - protein, 25 aa, Homo sapiens
CARIKARYYGSVSAPLGYYYYMDVW

SEQ ID NO: 48713 - protein, 22 aa, Homo sapiens
CARQVGITIFGVVIMRSSFDYW

SEQ ID NO: 48714 - protein, 17 aa, Homo sapiens
CAKGDTAMAPYNWFDPW

SEQ ID NO: 48715 - protein, 19 aa, Homo sapiens
CARAAEDYYDSSGYSFDYW

SEQ ID NO: 48716 - protein, 20 aa, Homo sapiens
CARAESPMIRGVIITMFDLW

SEQ ID NO: 48717 - protein, 18 aa, Homo sapiens
CAKDPTVTTILDLYFDYW

SEQ ID NO: 48718 - protein, 23 aa, Homo sapiens
CARAPGLWYYYDSSGYRDAFDIW

SEQ ID NO: 48719 - protein, 20 aa, Homo sapiens
CARGGYSYGFLNYYYYMDVW

SEQ ID NO: 48720 - protein, 13 aa, Homo sapiens
CAHYTALVPFDYW

SEQ ID NO: 48721 - protein, 19 aa, Homo sapiens
CVRDCEGRDTGEDWYFDLW

SEQ ID NO: 48722 - protein, 24 aa, Homo sapiens
CARQGFLEWLLYRRAGGGSWFDPW

SEQ ID NO: 48723 - protein, 13 aa, Homo sapiens
CQQYSNFPPESAF

SEQ ID NO: 48724 - protein, 21 aa, Homo sapiens
CARVARGGYYPGYYYYYMDVW

SEQ ID NO: 48725 - protein, 18 aa, Homo sapiens
CAKAPQPDDYYYYGMDVW

SEQ ID NO: 48726 - protein, 21 aa, Homo sapiens
CARRRQQLAPFYYYYYGMDVW

SEQ ID NO: 48727 - protein, 16 aa, Homo sapiens
CAHKVVRLHGPYFDYW

SEQ ID NO: 48728 - protein, 14 aa, Homo sapiens
CAKAPSGWHHFDYW

SEQ ID NO: 48729 - protein, 19 aa, Homo sapiens
CARDRRPMDPYYYYGMDFW

SEQ ID NO: 48730 - protein, 23 aa, Homo sapiens
CAKHPELDYVWGSYRSPWYFDYW

SEQ ID NO: 48731 - protein, 20 aa, Homo sapiens
CARPNQPYSNYYYYFGMDVW

SEQ ID NO: 48732 - protein, 26 aa, Homo sapiens
CARDGRYYYDSSGYYPPIANWYFDLW

SEQ ID NO: 48733 - protein, 22 aa, Homo sapiens
CATEAVYDFWSGYNHYSYMDVW

SEQ ID NO: 48734 - protein, 22 aa, Homo sapiens
CARVLMPLYDQLHYYYYGMDVW

SEQ ID NO: 48735 - protein, 18 aa, Homo sapiens
CARARAWLLLLVDAFDIW

SEQ ID NO: 48736 - protein, 24 aa, Homo sapiens
CAREGSRYYYDSSGYYRTSWFDPW

SEQ ID NO: 48737 - protein, 18 aa, Homo sapiens
CSRNVLQFLEWPFAMDVW

SEQ ID NO: 48738 - protein, 16 aa, Homo sapiens
CARSPTAMAGTPADYW

SEQ ID NO: 48739 - protein, 21 aa, Homo sapiens
CARDGPRHSSGLPTDYPFDLW

SEQ ID NO: 48740 - protein, 15 aa, Homo sapiens
CARGGADWGYWFDPW

SEQ ID NO: 48741 - protein, 30 aa, Homo sapiens
CASITAPHDTYYDFWSGYTITHYYYYMDVW

SEQ ID NO: 48742 - protein, 19 aa, Homo sapiens
CARHLAGGGDWDLYYFDYW

SEQ ID NO: 48743 - protein, 15 aa, Homo sapiens
CARELVDYGDYRDYW

SEQ ID NO: 48744 - protein, 19 aa, Homo sapiens
CAHSTLGIAVAGRRWFDPW

SEQ ID NO: 48745 - protein, 18 aa, Homo sapiens
CAKDSSDSGYYVGSFDSW

SEQ ID NO: 48746 - protein, 25 aa, Homo sapiens
CARDRSKATYYYGSGSYPTDAFDIW

SEQ ID NO: 48747 - protein, 20 aa, Homo sapiens
CTRGFYSSWRRPYYYGMDVW

SEQ ID NO: 48748 - protein, 25 aa, Homo sapiens
CAKDIARDYYGSGSPTRYYYGMDVW

SEQ ID NO: 48749 - protein, 20 aa, Homo sapiens
CARDTALGVGATTLRGFDYW

SEQ ID NO: 48750 - protein, 18 aa, Homo sapiens
CARVGDGYNLGSWYFDLW

SEQ ID NO: 48751 - protein, 22 aa, Homo sapiens
CARVRYSSGWYSDSFRWYFDLW

SEQ ID NO: 48752 - protein, 25 aa, Homo sapiens
CAKDDIVVVPALLVWVDYYYGMDVW

SEQ ID NO: 48753 - protein, 23 aa, Homo sapiens
CATDRVVPAAIPYYYYYYGMDVW

SEQ ID NO: 48754 - protein, 24 aa, Homo sapiens
CARGESIVVPAAHTYYYYYYMDVW

SEQ ID NO: 48755 - protein, 26 aa, Homo sapiens
CAKEGYCSSTSCYRLEQQLISWFDPW

SEQ ID NO: 48756 - protein, 42 aa, Homo sapiens
CALPILGIWISTLLGAASVAGAVGTSGTLEAGGSILRWADSW

SEQ ID NO: 48757 - protein, 24 aa, Homo sapiens
CARGPRYYDYVWGSYYYYYGMDVW

SEQ ID NO: 48758 - protein, 14 aa, Homo sapiens
CAKVGGTTQPTDYW

SEQ ID NO: 48759 - protein, 17 aa, Homo sapiens
CARVLGLRYYDFWFDPW

SEQ ID NO: 48760 - protein, 19 aa, Homo sapiens
CAKDTHSGNYNYYYYMDVW

SEQ ID NO: 48761 - protein, 23 aa, Homo sapiens
CARVTSRPITIFGVGVIDAFDIW

SEQ ID NO: 48762 - protein, 15 aa, Homo sapiens
CARSLSGYYYGEDYW

SEQ ID NO: 48763 - protein, 20 aa, Homo sapiens
CARDNYDILTGGGSGGFDPW

SEQ ID NO: 48764 - protein, 22 aa, Homo sapiens
CARIQLTRDQDYYYYYYYMDVW

SEQ ID NO: 48765 - protein, 19 aa, Homo sapiens
CARDAGDGYPTLYWYFDLW

SEQ ID NO: 48766 - protein, 20 aa, Homo sapiens
CARDITMIVVVIRGVWFDPW

SEQ ID NO: 48767 - protein, 19 aa, Homo sapiens
CAGDIVVVVAAVSNAFDIW

SEQ ID NO: 48768 - protein, 24 aa, Homo sapiens
CAKEKGYSIDGGKSAILGPSFDYW

SEQ ID NO: 48769 - protein, 20 aa, Homo sapiens
CTTDVELGYCSGGSCYSDYW

SEQ ID NO: 48770 - protein, 27 aa, Homo sapiens
CARDTGSYSLESDGYWGSNEGGNFDLW

SEQ ID NO: 48771 - protein, 15 aa, Homo sapiens
CARMSTNSWYYFDYW

SEQ ID NO: 48772 - protein, 14 aa, Homo sapiens
CARVGDYGSYFDFW

SEQ ID NO: 48773 - protein, 21 aa, Homo sapiens
CAKDLVMTTVTLVKENWFDPW

SEQ ID NO: 48774 - protein, 18 aa, Homo sapiens
CAREAQFADHGSGSHDYW

SEQ ID NO: 48775 - protein, 17 aa, Homo sapiens
CATVPPGNGGNGHFDNW

SEQ ID NO: 48776 - protein, 14 aa, Homo sapiens
CARGYYADYRLDYW

SEQ ID NO: 48777 - protein, 25 aa, Homo sapiens
CARVEESCSGGSCYDYYYYYGMDVW

SEQ ID NO: 48778 - protein, 18 aa, Homo sapiens
CARGYYDFWSGPNWFDPW

SEQ ID NO: 48779 - protein, 24 aa, Homo sapiens
CARAHAITMVRGVIYYYYYGMDVW

SEQ ID NO: 48780 - protein, 22 aa, Homo sapiens
CTTIKRALTYYDFWSEGWFDPW

SEQ ID NO: 48781 - protein, 17 aa, Homo sapiens
CAGERVEMATRNAFDIW

SEQ ID NO: 48782 - protein, 18 aa, Homo sapiens
CARGFQSWTPIGYYFDLW

SEQ ID NO: 48783 - protein, 22 aa, Homo sapiens
CARGVQITGTTYYYYYYYMDVW

SEQ ID NO: 48784 - protein, 18 aa, Homo sapiens
CARSDYNLLTGSDAFDIW

SEQ ID NO: 48785 - protein, 13 aa, Homo sapiens
CVVFSGDWQGDYW

SEQ ID NO: 48786 - protein, 16 aa, Homo sapiens
CAKDISPVAIGGGDYW

SEQ ID NO: 48787 - protein, 18 aa, Homo sapiens
CARGLAAAGTGMTSFDYW

SEQ ID NO: 48788 - protein, 17 aa, Homo sapiens
CALGGNLAAAYLRGDYW

SEQ ID NO: 48789 - protein, 20 aa, Homo sapiens
CARDQAYCGGDCYSPPYDYW

SEQ ID NO: 48790 - protein, 17 aa, Homo sapiens
CATASAFWSGYSGFDPW

SEQ ID NO: 48791 - protein, 26 aa, Homo sapiens
CAAGYSGYDAYGWDSGWTDHDAFDIW

SEQ ID NO: 48792 - protein, 17 aa, Homo sapiens
CAKDYGGNFGLHAFDIW

SEQ ID NO: 48793 - protein, 18 aa, Homo sapiens
CTRDYCSSTSCQYYFDYW

SEQ ID NO: 48794 - protein, 25 aa, Homo sapiens
CARDTQKSYDFWSGYSTTSPYFDLW

SEQ ID NO: 48795 - protein, 24 aa, Homo sapiens
CARGFRLGVTAILSLLYYYGMDVW

SEQ ID NO: 48796 - protein, 23 aa, Homo sapiens
CARGRGIIVVVLVAIEASWFDPW

SEQ ID NO: 48797 - protein, 13 aa, Homo sapiens
CLAWDSTTAFYVF

SEQ ID NO: 48798 - protein, 18 aa, Homo sapiens
CAKVTDYYVSRGYEFDSW

SEQ ID NO: 48799 - protein, 18 aa, Homo sapiens
CARAYWVVPAAYWYFDLW

SEQ ID NO: 48800 - protein, 13 aa, Homo sapiens
CARHYIAAQFDPW

SEQ ID NO: 48801 - protein, 25 aa, Homo sapiens
CARHPRSDFWSGYYIEVVSYYFDYW

SEQ ID NO: 48802 - protein, 19 aa, Homo sapiens
CARDFPPFDDSSGYHFGYW

SEQ ID NO: 48803 - protein, 13 aa, Homo sapiens
CCSYAGRYNFCVF

SEQ ID NO: 48804 - protein, 18 aa, Homo sapiens
CARHFSPKFAPGTNFDYW

SEQ ID NO: 48805 - protein, 20 aa, Homo sapiens
CARGGTPDVFGPEEKPLDYW

SEQ ID NO: 48806 - protein, 19 aa, Homo sapiens
CARQARWFGELILGWFDPW

SEQ ID NO: 48807 - protein, 19 aa, Homo sapiens
CARGRYDSSGPYYYYMDLW

SEQ ID NO: 48808 - protein, 20 aa, Homo sapiens
CASDRGDSSGYYPLLGFDYW

SEQ ID NO: 48809 - protein, 15 aa, Homo sapiens
CARGKDNWNYDFDYW

SEQ ID NO: 48810 - protein, 17 aa, Homo sapiens
CARGAVAGPRYNWFDPW

SEQ ID NO: 48811 - protein, 13 aa, Homo sapiens
CAGIQLWGTVDYW

SEQ ID NO: 48812 - protein, 22 aa, Homo sapiens
CARVSTDYDFWSGYVNNWFDPW

SEQ ID NO: 48813 - protein, 13 aa, Homo sapiens
CQHYISYSPEWTF

SEQ ID NO: 48814 - protein, 21 aa, Homo sapiens
CARHRGNIVVVVAAPFWFDPW

SEQ ID NO: 48815 - protein, 18 aa, Homo sapiens
CQSFDTSLSGQLSGGYVF

SEQ ID NO: 48816 - protein, 16 aa, Homo sapiens
CARGWEKDRSGAFDVW

SEQ ID NO: 48817 - protein, 18 aa, Homo sapiens
CTRYPLDVYYYYYGMDVW

SEQ ID NO: 48818 - protein, 21 aa, Homo sapiens
CASTLDYSNPNKYYYYYMDVW

SEQ ID NO: 48819 - protein, 17 aa, Homo sapiens
CARANQRDGYNYDFDYW

SEQ ID NO: 48820 - protein, 23 aa, Homo sapiens
CARGTTVTHELPLPYYYYYMGVW

SEQ ID NO: 48821 - protein, 23 aa, Homo sapiens
CARSPPFTIFGVVPGGYYYMDVW

SEQ ID NO: 48822 - protein, 22 aa, Homo sapiens
CAHNPIFTIFGVVISSNWFDPW

SEQ ID NO: 48823 - protein, 24 aa, Homo sapiens
CAKVITIFGVVIDDYYYYYGMDVW

SEQ ID NO: 48824 - protein, 15 aa, Homo sapiens
CVRDMGPHTAMVDYW

SEQ ID NO: 48825 - protein, 14 aa, Homo sapiens
CATTRFRVAENDYW

SEQ ID NO: 48826 - protein, 15 aa, Homo sapiens
CASGTMSDSGWLDPW

SEQ ID NO: 48827 - protein, 21 aa, Homo sapiens
CAKGGRFLEWFIGLADAFDIW

SEQ ID NO: 48828 - protein, 16 aa, Homo sapiens
CAKRILETSGRGFDCW

SEQ ID NO: 48829 - protein, 16 aa, Homo sapiens
CARETPTDGLHYFDYW

SEQ ID NO: 48830 - protein, 14 aa, Homo sapiens
CATAGDYPKRFDYW

SEQ ID NO: 48831 - protein, 16 aa, Homo sapiens
CAKLTGAEGGSAFDIW

SEQ ID NO: 48832 - protein, 14 aa, Homo sapiens
CAKGGPRWNDIDYW

SEQ ID NO: 48833 - protein, 20 aa, Homo sapiens
CAKGTLPNCRSVRCYPFDFW

SEQ ID NO: 48834 - protein, 18 aa, Homo sapiens
CAREEQLTVRAVDGMDVW

SEQ ID NO: 48835 - protein, 19 aa, Homo sapiens
CAKDPSPYGSGSYSWFDPW

SEQ ID NO: 48836 - protein, 19 aa, Homo sapiens
CTVYFDSSDDSPGDDFDYW

SEQ ID NO: 48837 - protein, 20 aa, Homo sapiens
CAKDPGMIVVARGGDYFDYW

SEQ ID NO: 48838 - protein, 24 aa, Homo sapiens
CARESSAYYDSVGSQKYYYGMDVW

SEQ ID NO: 48839 - protein, 17 aa, Homo sapiens
CARPVKYSSGWYFFDYW

SEQ ID NO: 48840 - protein, 28 aa, Homo sapiens
CARDKAYYDFWSGYLPHPLYYYYYMDVW

SEQ ID NO: 48841 - protein, 19 aa, Homo sapiens
CAREVVPAKRWRIWYFDLW

SEQ ID NO: 48842 - protein, 16 aa, Homo sapiens
CARAPLFLEWSDFDYW

SEQ ID NO: 48843 - protein, 19 aa, Homo sapiens
CAKDIEEQQLVQFDWFDPW

SEQ ID NO: 48844 - protein, 24 aa, Homo sapiens
CARAPDYGDYEGGYYYYYYGMDVW

SEQ ID NO: 48845 - protein, 19 aa, Homo sapiens
CASSTGWLRFRGTDAFDIW

SEQ ID NO: 48846 - protein, 11 aa, Homo sapiens
CALGPMGFDLW

SEQ ID NO: 48847 - protein, 19 aa, Homo sapiens
CARDHAHYYDSSGYLLDYW

SEQ ID NO: 48848 - protein, 15 aa, Homo sapiens
CAHSYGGNSGGYDYW

SEQ ID NO: 48849 - protein, 18 aa, Homo sapiens
CARQGDYYDSSGSNFDYW

SEQ ID NO: 48850 - protein, 19 aa, Homo sapiens
CTRDVRFLEWLLFGWFDPW

SEQ ID NO: 48851 - protein, 17 aa, Homo sapiens
CAVESSFSRLLWVFDYW

SEQ ID NO: 48852 - protein, 15 aa, Homo sapiens
CARKSYGSSYYADQW

SEQ ID NO: 48853 - protein, 22 aa, Homo sapiens
CAKTSGPYCSGGSCLSYYFDYW

SEQ ID NO: 48854 - protein, 18 aa, Homo sapiens
CAKSEGYFYDSSGPIDYW

SEQ ID NO: 48855 - protein, 20 aa, Homo sapiens
CARGVSTTVTYYYYYYMDVW

SEQ ID NO: 48856 - protein, 21 aa, Homo sapiens
CARGDEYSDDMGYYERWFDPW

SEQ ID NO: 48857 - protein, 25 aa, Homo sapiens
CARVDTAMVTVVPREKGGKNWFDPW

SEQ ID NO: 48858 - protein, 30 aa, Homo sapiens
CARGSVTIPAYYDFWSGYSLNYYYYYMDVW

SEQ ID NO: 48859 - protein, 18 aa, Homo sapiens
CARDRSYNWNSPDAFDIW

SEQ ID NO: 48860 - protein, 18 aa, Homo sapiens
CARARVVVPAASNWFDPW

SEQ ID NO: 48861 - protein, 18 aa, Homo sapiens
CARDGSITGTNNNWFDPW

SEQ ID NO: 48862 - protein, 21 aa, Homo sapiens
CARGGLLRYYDWLLNHYYDYW

SEQ ID NO: 48863 - protein, 22 aa, Homo sapiens
CTTDPEPYNWNAGNYYYYMDVW

SEQ ID NO: 48864 - protein, 18 aa, Homo sapiens
CARYCVDIVATSNWFDPW

SEQ ID NO: 48865 - protein, 17 aa, Homo sapiens
CARGRTGATGTRWFDPW

SEQ ID NO: 48866 - protein, 19 aa, Homo sapiens
CARQGHYGSGDYYYGMDVW

SEQ ID NO: 48867 - protein, 20 aa, Homo sapiens
CATAVGPGYNWKYLHFFDYW

SEQ ID NO: 48868 - protein, 20 aa, Homo sapiens
CAREHFYDSTVYYLYYFDYW

SEQ ID NO: 48869 - protein, 18 aa, Homo sapiens
CARGGGTFLGPSGWFDPW

SEQ ID NO: 48870 - protein, 22 aa, Homo sapiens
CARKMSFHYYDSSAGYYYFDYW

SEQ ID NO: 48871 - protein, 20 aa, Homo sapiens
CARLGYYGSGRSPYNWFDPW

SEQ ID NO: 48872 - protein, 17 aa, Homo sapiens
CARDKPNTVTSYYFDYW

SEQ ID NO: 48873 - protein, 18 aa, Homo sapiens
CARDGGRWLQLYWYFDLW

SEQ ID NO: 48874 - protein, 19 aa, Homo sapiens
CARARYSGYDWAPDYFDSW

SEQ ID NO: 48875 - protein, 16 aa, Homo sapiens
CVKDFTIAVAGPFDSW

SEQ ID NO: 48876 - protein, 25 aa, Homo sapiens
CAKDGGIEIFGVVIPRYYYYGMDVW

SEQ ID NO: 48877 - protein, 10 aa, Homo sapiens
CACSKTFDYW

SEQ ID NO: 48878 - protein, 15 aa, Homo sapiens
CAKNGYDPDYYMDVW

SEQ ID NO: 48879 - protein, 19 aa, Homo sapiens
CARGAGPSGWYQGGFFDYW

SEQ ID NO: 48880 - protein, 15 aa, Homo sapiens
CATVGYGAETSDDYW

SEQ ID NO: 48881 - protein, 14 aa, Homo sapiens
CANLGRLGGWFDPW

SEQ ID NO: 48882 - protein, 17 aa, Homo sapiens
CARHSTLESHPQLFDFW

SEQ ID NO: 48883 - protein, 17 aa, Homo sapiens
CARGGQGGWYGWWFDPW

SEQ ID NO: 48884 - protein, 20 aa, Homo sapiens
CAREITIFGVVINSRHFDYW

SEQ ID NO: 48885 - protein, 19 aa, Homo sapiens
CARAPIKDGGYTVWYLDLW

SEQ ID NO: 48886 - protein, 18 aa, Homo sapiens
CARDVLYGYYSLGAFDIW

SEQ ID NO: 48887 - protein, 20 aa, Homo sapiens
CARAYYYDSSGYSPYYFDYW

SEQ ID NO: 48888 - protein, 17 aa, Homo sapiens
CTSGSHYYYYYYGMDVW

SEQ ID NO: 48889 - protein, 20 aa, Homo sapiens
CASISLGHCTGGSCQPLDYW

SEQ ID NO: 48890 - protein, 18 aa, Homo sapiens
CARDYSSGWYQGGPGDYW

SEQ ID NO: 48891 - protein, 18 aa, Homo sapiens
CVRYTASSSFGLYWFDYW

SEQ ID NO: 48892 - protein, 18 aa, Homo sapiens
CARRGGNCNSIDCYFDYW

SEQ ID NO: 48893 - protein, 25 aa, Homo sapiens
CARGVRSDGFDYDILTGYYRAFDYW

SEQ ID NO: 48894 - protein, 21 aa, Homo sapiens
CARDSHDYGYWRVQGDYFDYW

SEQ ID NO: 48895 - protein, 15 aa, Homo sapiens
CVKVRETTVSPFDHW

SEQ ID NO: 48896 - protein, 17 aa, Homo sapiens
CASGIAAAGTEAWFDPW

SEQ ID NO: 48897 - protein, 15 aa, Homo sapiens
CASQGTFSNYYLDYW

SEQ ID NO: 48898 - protein, 24 aa, Homo sapiens
CAKDLAGSALLWFGELYTEAFDYW

SEQ ID NO: 48899 - protein, 27 aa, Homo sapiens
CAKIKHTRRERYYYDSSGYPVDAFDIW

SEQ ID NO: 48900 - protein, 16 aa, Homo sapiens
CAKGTFGELFGLVDYW

SEQ ID NO: 48901 - protein, 18 aa, Homo sapiens
CARAIPGAWLRSNWFDPW

SEQ ID NO: 48902 - protein, 24 aa, Homo sapiens
CAKDTDTVYSSGWYNRGGYYFDYW

SEQ ID NO: 48903 - protein, 16 aa, Homo sapiens
CATVHAAVLVYRWDYW

SEQ ID NO: 48904 - protein, 15 aa, Homo sapiens
CAKDPTAVAGPLDYW

SEQ ID NO: 48905 - protein, 15 aa, Homo sapiens
CAKEEGYFGFAFDYW

SEQ ID NO: 48906 - protein, 21 aa, Homo sapiens
CARAVRGVIIIAGYYYGMDVW

SEQ ID NO: 48907 - protein, 22 aa, Homo sapiens
CARLSCSGDSCYSFANNWFDPW

SEQ ID NO: 48908 - protein, 17 aa, Homo sapiens
CARGRYIAARPGPLDYW

SEQ ID NO: 48909 - protein, 20 aa, Homo sapiens
CAGQGEYSYGENYYYYMDVW

SEQ ID NO: 48910 - protein, 33 aa, Homo sapiens
CARAGNHYYDSSGFWSLLQRDSNHYYYYGMDVW

SEQ ID NO: 48911 - protein, 17 aa, Homo sapiens
CARSVSSGTFSWWFDPW

SEQ ID NO: 48912 - protein, 12 aa, Homo sapiens
CAREYDFRIDYW

SEQ ID NO: 48913 - protein, 23 aa, Homo sapiens
CATAPIRADYYDSSGYYYAIDYW

SEQ ID NO: 48914 - protein, 23 aa, Homo sapiens
CARDPPLYYDSSGNDYYYGMDVW

SEQ ID NO: 48915 - protein, 26 aa, Homo sapiens
CARHGGRIYRYGATQTYYYFYHMDVW

SEQ ID NO: 48916 - protein, 24 aa, Homo sapiens
CARDSASTSSTGWIFNYYYGMDVW

SEQ ID NO: 48917 - protein, 20 aa, Homo sapiens
CATSPRFVGSYRHGDRFDSW

SEQ ID NO: 48918 - protein, 17 aa, Homo sapiens
CASGSDYYGSGSYYDYW

SEQ ID NO: 48919 - protein, 18 aa, Homo sapiens
CARVTLLTIFEPTAFDYW

SEQ ID NO: 48920 - protein, 14 aa, Homo sapiens
CTWYSYGSGTFDHW

SEQ ID NO: 48921 - protein, 21 aa, Homo sapiens
CAKRPIYCGGDCYPYDAFDIW

SEQ ID NO: 48922 - protein, 27 aa, Homo sapiens
CASYSYCSSTSCYRNGFYYYYYGMDVW

SEQ ID NO: 48923 - protein, 22 aa, Homo sapiens
CARRPGFYYYDSSGYYPSFDYW

SEQ ID NO: 48924 - protein, 20 aa, Homo sapiens
CARGSDARVPAAGNDGFDNW

SEQ ID NO: 48925 - protein, 26 aa, Homo sapiens
CARDLGRERITIFGVVTHYYYYMDVW

SEQ ID NO: 48926 - protein, 20 aa, Homo sapiens
CMRDRHDSSSFYFYDAFDIW

SEQ ID NO: 48927 - protein, 23 aa, Homo sapiens
CAKDGGYDNGGYYYLSRGYFDLW

SEQ ID NO: 48928 - protein, 13 aa, Homo sapiens
CATWIQLWRFDYW

SEQ ID NO: 48929 - protein, 16 aa, Homo sapiens
CARDLPDYGDKSFDYW

SEQ ID NO: 48930 - protein, 19 aa, Homo sapiens
CATDYGDYTLYYYYGMDVW

SEQ ID NO: 48931 - protein, 27 aa, Homo sapiens
CAREAGRNYDFWSGYYTLPEDNWFDPW

SEQ ID NO: 48932 - protein, 20 aa, Homo sapiens
CATARIGPNVGWVVNYFDYW

SEQ ID NO: 48933 - protein, 16 aa, Homo sapiens
CARGNVEMATPYLDYW

SEQ ID NO: 48934 - protein, 27 aa, Homo sapiens
CARGPTSTYYYDSSGYQGYYYYYMDVW

SEQ ID NO: 48935 - protein, 19 aa, Homo sapiens
CAKDTILAVPGAVGWFAPW

SEQ ID NO: 48936 - protein, 15 aa, Homo sapiens
CARDGLYRSYYFGYW

SEQ ID NO: 48937 - protein, 23 aa, Homo sapiens
CARDGLGNYDILTGYYNRAFDIW

SEQ ID NO: 48938 - protein, 11 aa, Homo sapiens [sequence omitted]

SEQ ID NO: 48939 - protein, 17 aa, Homo sapiens
CARSPAVRRGSDYFDYW

SEQ ID NO: 48940 - protein, 20 aa, Homo sapiens
CATRESRGLWFGELGTFDLW

SEQ ID NO: 48941 - protein, 23 aa, Homo sapiens
CARGGAGITIFGVLIISHWFDPW

SEQ ID NO: 48942 - protein, 15 aa, Homo sapiens
CASVPTVTTYAFDVW

SEQ ID NO: 48943 - protein, 19 aa, Homo sapiens
CARAHARVYYDSSGFFDYW

SEQ ID NO: 48944 - protein, 23 aa, Homo sapiens
CARVGPALRFLEWSLGAYYMDVW

SEQ ID NO: 48945 - protein, 15 aa, Homo sapiens
CARCPITGTPPVDYW

SEQ ID NO: 48946 - protein, 20 aa, Homo sapiens
CARIDRLQEVPAAYDAFDIW

SEQ ID NO: 48947 - protein, 19 aa, Homo sapiens
CAREGFLEWFHYYYGMDVW

SEQ ID NO: 48948 - protein, 19 aa, Homo sapiens
CAKDHLGYSYGPADYMDVW

SEQ ID NO: 48949 - protein, 25 aa, Homo sapiens
CARESRADSYDSSVNYYYYYGMDVW

SEQ ID NO: 48950 - protein, 20 aa, Homo sapiens
CALNPYYDALTGYYDYVDVW

SEQ ID NO: 48951 - protein, 13 aa, Homo sapiens
CARDPGGREFEYW

SEQ ID NO: 48952 - protein, 12 aa, Homo sapiens
CTIDYGGFFDYW

SEQ ID NO: 48953 - protein, 22 aa, Homo sapiens
CARHASSTIFGVVTFGAFFDYW

SEQ ID NO: 48954 - protein, 16 aa, Homo sapiens
CARVHYSDFHDSFDIW

SEQ ID NO: 48955 - protein, 18 aa, Homo sapiens
CAKEHTAMVSPHHWFDPW

SEQ ID NO: 48956 - protein, 20 aa, Homo sapiens
CARDGSLSVGRTVVDWFDPW

SEQ ID NO: 48957 - protein, 19 aa, Homo sapiens
CARDIKDSSSWYDGWFDPW

SEQ ID NO: 48958 - protein, 26 aa, Homo sapiens
CARIVLGERFLEWTPFPLYYYYMDVW

SEQ ID NO: 48959 - protein, 22 aa, Homo sapiens
CARHGGITMIVVVTIPGWFDPW

SEQ ID NO: 48960 - protein, 20 aa, Homo sapiens
CTRDRWPSLIVVVPAAHDYW

SEQ ID NO: 48961 - protein, 12 aa, Homo sapiens
CSSYAGNYNLLF

SEQ ID NO: 48962 - protein, 22 aa, Homo sapiens
CAKEMDDFWSGYLYYYYGMDVW

SEQ ID NO: 48963 - protein, 15 aa, Homo sapiens
CARGGWSKVYAFDIW

SEQ ID NO: 48964 - protein, 22 aa, Homo sapiens
CARGGWLRLSNNYYYYYYMDVW

SEQ ID NO: 48965 - protein, 25 aa, Homo sapiens
CATGPSGQVYKGLKTTVTTSWFDPW

SEQ ID NO: 48966 - protein, 19 aa, Homo sapiens
CASGDYDFWSGYPPYFDYW

SEQ ID NO: 48967 - protein, 10 aa, Homo sapiens
CCSYAGSYAF

SEQ ID NO: 48968 - protein, 21 aa, Homo sapiens
CARHDRGGFMIVVAPGPFDYW

SEQ ID NO: 48969 - protein, 25 aa, Homo sapiens
CAREIGGFDWLLHSDYYYYYGMDVW

SEQ ID NO: 48970 - protein, 21 aa, Homo sapiens
CAKDRSDGYSSSPPSWYFDLW

SEQ ID NO: 48971 - protein, 22 aa, Homo sapiens
CAISTPHCSSTSCRATNWFDPW

SEQ ID NO: 48972 - protein, 19 aa, Homo sapiens
CARDLYVGDNGGIWYFDLW

SEQ ID NO: 48973 - protein, 21 aa, Homo sapiens
CAHRYPFMITFGGVEDAFDIW

SEQ ID NO: 48974 - protein, 24 aa, Homo sapiens
CARGSATYYYDSSGYYHGYLFDYW

SEQ ID NO: 48975 - protein, 22 aa, Homo sapiens
CAKDGPGTKEGILYWCDAFDIW

SEQ ID NO: 48976 - protein, 16 aa, Homo sapiens
CASNRGYSGYEPFDYW

SEQ ID NO: 48977 - protein, 21 aa, Homo sapiens
CARDVYVRACGGDCSRAFDIW

SEQ ID NO: 48978 - protein, 21 aa, Homo sapiens
CARGFHWTTADYYYYYGMDVW

SEQ ID NO: 48979 - protein, 12 aa, Homo sapiens
CTSGRAKFFDLW

SEQ ID NO: 48980 - protein, 16 aa, Homo sapiens
CAKWLIVQVPDAFDIW

SEQ ID NO: 48981 - protein, 16 aa, Homo sapiens
CAHRTYYDSSGSFDYW

SEQ ID NO: 48982 - protein, 27 aa, Homo sapiens
CARSTTMYCSSTSCYLRYYYYYGMDVW

SEQ ID NO: 48983 - protein, 23 aa, Homo sapiens
CAGVRPDRYCSGGACFHNWFDPW

SEQ ID NO: 48984 - protein, 24 aa, Homo sapiens
CAKAGARVAARGYFYTGGDPFDYW

SEQ ID NO: 48985 - protein, 16 aa, Homo sapiens
CAREHVGSYHEAFDYW

SEQ ID NO: 48986 - protein, 16 aa, Homo sapiens
CARDQMVITSPYFDYW

SEQ ID NO: 48987 - protein, 26 aa, Homo sapiens
CAKDFHYYDSSGYPARDYYYYYMDVW

SEQ ID NO: 48988 - protein, 22 aa, Homo sapiens
CARREIGITIFGVVTRRGFDPW

SEQ ID NO: 48989 - protein, 21 aa, Homo sapiens
CARDGITIFGVVIGFDGMDVW

SEQ ID NO: 48990 - protein, 21 aa, Homo sapiens
CAKVSEVPAAYYYYYYYMDVW

SEQ ID NO: 48991 - protein, 25 aa, Homo sapiens
CAKLGYCSSGSCYDPHYYFYYMDVW

SEQ ID NO: 48992 - protein, 23 aa, Homo sapiens
CARDIRLGIGGAAAGRRGAFDIW

SEQ ID NO: 48993 - protein, 12 aa, Homo sapiens
CASLYSSGSDYW

SEQ ID NO: 48994 - protein, 24 aa, Homo sapiens
CATATAVAGTGVEFIYYYYGMDVW

SEQ ID NO: 48995 - protein, 22 aa, Homo sapiens
CARGPASITMIVVVLAWYFDLW

SEQ ID NO: 48996 - protein, 20 aa, Homo sapiens
CARVGTGDGKVYYYYGLDVW

SEQ ID NO: 48997 - protein, 23 aa, Homo sapiens
CARDAGITIFGVVPYNLGYFDYW

SEQ ID NO: 48998 - protein, 21 aa, Homo sapiens
CARVSYYYDSNDSITYYFDYW

SEQ ID NO: 48999 - protein, 21 aa, Homo sapiens
CAKDIDEWVTIFGVVIMGDYW

SEQ ID NO: 49000 - protein, 18 aa, Homo sapiens
CTRALGPKSYYYYGMDVW

SEQ ID NO: 49001 - protein, 16 aa, Homo sapiens
CARDRLEWELCWFDPW

SEQ ID NO: 49002 - protein, 19 aa, Homo sapiens
CAKPFFTAFTRTYWYFDLW

SEQ ID NO: 49003 - protein, 19 aa, Homo sapiens
CAKDRVSITIFGVGPFDYW

SEQ ID NO: 49004 - protein, 28 aa, Homo sapiens
CAKGDTYYDFWSGYLKSRDYYYYGMDVW

SEQ ID NO: 49005 - protein, 14 aa, Homo sapiens
CVYSSGYYGGVDYW

SEQ ID NO: 49006 - protein, 20 aa, Homo sapiens
CAREGRYSNYFGATAWFDPW

SEQ ID NO: 49007 - protein, 13 aa, Homo sapiens
CAQNGGVAGPDYW

SEQ ID NO: 49008 - protein, 16 aa, Homo sapiens
CATDQQWHAGDWFGPW

SEQ ID NO: 49009 - protein, 18 aa, Homo sapiens
CARDIAGGYSYGWYRDYW

SEQ ID NO: 49010 - protein, 21 aa, Homo sapiens
CAALPETTIFGVVIADGMDVW

SEQ ID NO: 49011 - protein, 24 aa, Homo sapiens
CARDKFLSGGSYLYYYYYYGMDVW

SEQ ID NO: 49012 - protein, 20 aa, Homo sapiens
CAKSGAAVAYSNLIYYFDSW

SEQ ID NO: 49013 - protein, 15 aa, Homo sapiens
CAKEKTATVTSIDYW

SEQ ID NO: 49014 - protein, 20 aa, Homo sapiens
CAKDGRGPYYYDSSGYFDYW

SEQ ID NO: 49015 - protein, 23 aa, Homo sapiens
CARSRGPHIVLVVYAIRGAFDIW

SEQ ID NO: 49016 - protein, 21 aa, Homo sapiens
CARDIGSIVVVVAATWGVDYW

SEQ ID NO: 49017 - protein, 16 aa, Homo sapiens
CARSEGGGYSSSYDYW

SEQ ID NO: 49018 - protein, 16 aa, Homo sapiens
CARRGGVLGLYYFDYW

SEQ ID NO: 49019 - protein, 31 aa, Homo sapiens
CTRDREPGLYSSGWYIGGLLRADEIPGIDYW

SEQ ID NO: 49020 - protein, 16 aa, Homo sapiens
CARARITGTIGTVDYW

SEQ ID NO: 49021 - protein, 22 aa, Homo sapiens
CAKDLLFSVLITVTTEYYFDYW

SEQ ID NO: 49022 - protein, 26 aa, Homo sapiens
CARGFPGRGALEYSSSSGRYSDFDYW

SEQ ID NO: 49023 - protein, 21 aa, Homo sapiens
CARTVVAADTTTEYYYYMDVW

SEQ ID NO: 49024 - protein, 19 aa, Homo sapiens
CARHSRGWLQLAPGEFDLW

SEQ ID NO: 49025 - protein, 16 aa, Homo sapiens
CARGPVVVVSAYLDSW

SEQ ID NO: 49026 - protein, 22 aa, Homo sapiens
CARDRRFWSGYRNYYYYYMDVW

SEQ ID NO: 49027 - protein, 19 aa, Homo sapiens
CARNYDLGDYEGGNWFDPW

SEQ ID NO: 49028 - protein, 16 aa, Homo sapiens
CAREGQWLGSNYFDYW

SEQ ID NO: 49029 - protein, 26 aa, Homo sapiens
CARVRERTRCDSSGYCSDYYYYMDVW

SEQ ID NO: 49030 - protein, 21 aa, Homo sapiens
CARGGVSRSRIARGPNALDVW

SEQ ID NO: 49031 - protein, 16 aa, Homo sapiens
CARGGDVVASGWFDPW

SEQ ID NO: 49032 - protein, 21 aa, Homo sapiens
CARERSYDFWSGYSRPYFDYW

SEQ ID NO: 49033 - protein, 20 aa, Homo sapiens
CAREVYRSMIVVVIAWFDTW

SEQ ID NO: 49034 - protein, 17 aa, Homo sapiens
CEVYGSVTHGGDTFDIW

SEQ ID NO: 49035 - protein, 29 aa, Homo sapiens
CAKDLRYCSGGSCYSSPPIYYYYYGMDVW

SEQ ID NO: 49036 - protein, 15 aa, Homo sapiens
CGRGGSTGWNPVDYW

SEQ ID NO: 49037 - protein, 23 aa, Homo sapiens
CARDGGIMITFGGVIVVEYFDYW

SEQ ID NO: 49038 - protein, 26 aa, Homo sapiens
CARGVGGGGFGVVIIPVHYYYYMDVW

SEQ ID NO: 49039 - protein, 22 aa, Homo sapiens
CAKDISPVLIAAAGTWGYFNYW

SEQ ID NO: 49040 - protein, 12 aa, Homo sapiens
CASHGPRVFDIW

SEQ ID NO: 49041 - protein, 17 aa, Homo sapiens
CVKGGGYSYGQYWFDPW

SEQ ID NO: 49042 - protein, 16 aa, Homo sapiens
CATGWAWLVPFGFDYW

SEQ ID NO: 49043 - protein, 27 aa, Homo sapiens
CAREPELPIEILAYCGGDCYSGYFDYW

SEQ ID NO: 49044 - protein, 24 aa, Homo sapiens
CARDPGIYTHLSPFCGGDCYSDYW

SEQ ID NO: 49045 - protein, 22 aa, Homo sapiens
CARSLSAEVLWFEATSNAFDIW

SEQ ID NO: 49046 - protein, 22 aa, Homo sapiens
CARNSASSIIGIVVVPAEFDPW

SEQ ID NO: 49047 - protein, 23 aa, Homo sapiens
CATSPVVRAATPVYYYYYGMDVW

SEQ ID NO: 49048 - protein, 17 aa, Homo sapiens
CARRSRAGEGSAYFDSW

SEQ ID NO: 49049 - protein, 18 aa, Homo sapiens
CAKSGGWYAYDEGYFDYW

SEQ ID NO: 49050 - protein, 17 aa, Homo sapiens
CAKDVDAVGFRRYFQNW

SEQ ID NO: 49051 - protein, 15 aa, Homo sapiens
CARVHPTVTTEFDPW

SEQ ID NO: 49052 - protein, 26 aa, Homo sapiens
CARLPTGYCSSTSCSSYYYYYGMDVW

SEQ ID NO: 49053 - protein, 18 aa, Homo sapiens
CARPNLPYYGSGSGFDYW

SEQ ID NO: 49054 - protein, 24 aa, Homo sapiens
CARVGPTHYDFWSGYYAGGWFDPW

SEQ ID NO: 49055 - protein, 17 aa, Homo sapiens
CAKLPYGDYVVHAFDYW

SEQ ID NO: 49056 - protein, 23 aa, Homo sapiens
CAKAYCGGDCYSFLSTDDAFDIW

SEQ ID NO: 49057 - protein, 25 aa, Homo sapiens
CARDPTSTTTVTTDDYYYYYGMDVW

SEQ ID NO: 49058 - protein, 16 aa, Homo sapiens
CARDHRGDGYTDFDYW

SEQ ID NO: 49059 - protein, 21 aa, Homo sapiens
CAKDNGPARRDYYYYYGMDVW

SEQ ID NO: 49060 - protein, 12 aa, Homo sapiens
CAGDGSGTFDIW

SEQ ID NO: 49061 - protein, 16 aa, Homo sapiens
CARRYYDSSGPNDDYW

SEQ ID NO: 49062 - protein, 20 aa, Homo sapiens
CAREVAYYDSSGYYSRFDYW

SEQ ID NO: 49063 - protein, 21 aa, Homo sapiens
CARHPGRDKPYSLSADWFDPW

SEQ ID NO: 49064 - protein, 18 aa, Homo sapiens
CARDPTYVSWGEYYFDYW

SEQ ID NO: 49065 - protein, 20 aa, Homo sapiens
CARDAEGFSNGVWYDAYDLW

SEQ ID NO: 49066 - protein, 21 aa, Homo sapiens
CTTDDCTGGVCSYYYYYMDVW

SEQ ID NO: 49067 - protein, 22 aa, Homo sapiens
CAKQTAPYCSGGSCYSGAFDYW

SEQ ID NO: 49068 - protein, 25 aa, Homo sapiens
CAKALPPPHYGSGSYGPYYYGMDVW

SEQ ID NO: 49069 - protein, 16 aa, Homo sapiens
CAKSLGGNYRDAFDIW

SEQ ID NO: 49070 - protein, 24 aa, Homo sapiens
CARGGAPYYYDSSGYYSGNWFDPW

SEQ ID NO: 49071 - protein, 19 aa, Homo sapiens
CAKGAHSGSGSYYEILDYW

SEQ ID NO: 49072 - protein, 23 aa, Homo sapiens
CARDRPFVVVTDTYYYYYGMDVW

SEQ ID NO: 49073 - protein, 29 aa, Homo sapiens
CARGKNGPGYCSGGSCYRLPRYYYGMDVW

SEQ ID NO: 49074 - protein, 27 aa, Homo sapiens
CARDAQDIVLVPVALRGNHYYYAMDVW

SEQ ID NO: 49075 - protein, 17 aa, Homo sapiens
CARYFVCGGDCYSFDYW

SEQ ID NO: 49076 - protein, 21 aa, Homo sapiens
CARASLGAVAGKGAHWGFDPW

SEQ ID NO: 49077 - protein, 20 aa, Homo sapiens
CTTAWWNYYDSSGYYLFDYW

SEQ ID NO: 49078 - protein, 24 aa, Homo sapiens
CARGSGYYDFWSGYPPGSYYFDYW

SEQ ID NO: 49079 - protein, 22 aa, Homo sapiens
CARDDDYYDSSGYPLGIPFDYW

SEQ ID NO: 49080 - protein, 18 aa, Homo sapiens
CAKPLFSYSYGQYYFDYW

SEQ ID NO: 49081 - protein, 25 aa, Homo sapiens
CARTYCSSTSCPGHSYYYYYGMDVW

SEQ ID NO: 49082 - protein, 22 aa, Homo sapiens
CARAAAPIVLMVYADEYYFDYW

SEQ ID NO: 49083 - protein, 19 aa, Homo sapiens
CARDMGPLTGYYNGWFDPW

SEQ ID NO: 49084 - protein, 30 aa, Homo sapiens
CARGGVSERDSAGITIFGVVIMDYYYMDVW

SEQ ID NO: 49085 - protein, 20 aa, Homo sapiens
CARARPVGGTNRQEGASDVW

SEQ ID NO: 49086 - protein, 16 aa, Homo sapiens
CVKSRGSDWYDAFDSW

SEQ ID NO: 49087 - protein, 21 aa, Homo sapiens
CARDGGKDYGGNSHLNTFDIW

SEQ ID NO: 49088 - protein, 24 aa, Homo sapiens
CARQKVAITMRVVVINGGGAFDIW

SEQ ID NO: 49089 - protein, 23 aa, Homo sapiens
CATGAAVAGTLPDFYYYYGMDVW

SEQ ID NO: 49090 - protein, 16 aa, Homo sapiens
CARGASRGYLDAFDIW

SEQ ID NO: 49091 - protein, 16 aa, Homo sapiens
CAHRGLPWWGGYFDYW

SEQ ID NO: 49092 - protein, 23 aa, Homo sapiens
CAREGKGSEQWLVGYYHYYMDVW

SEQ ID NO: 49093 - protein, 21 aa, Homo sapiens
CARDFDGKGDLVQECHAFDIW

SEQ ID NO: 49094 - protein, 20 aa, Homo sapiens
CARIWRDCSGGSCYLLFDPW

SEQ ID NO: 49095 - protein, 24 aa, Homo sapiens
CARAPPGGFYDSSAYYYGRPFDYW

SEQ ID NO: 49096 - protein, 20 aa, Homo sapiens
CAHSRWNITMIVVVNPFDYW

SEQ ID NO: 49097 - protein, 15 aa, Homo sapiens
CARDRGDSGDGFDYW

SEQ ID NO: 49098 - protein, 21 aa, Homo sapiens
CARRTRGGYDYVHYYYYMDVW

SEQ ID NO: 49099 - protein, 20 aa, Homo sapiens
CARSRVFRIAARPGNWFDPW

SEQ ID NO: 49100 - protein, 17 aa, Homo sapiens
CARGPLNWSGRGYFDLW

SEQ ID NO: 49101 - protein, 18 aa, Homo sapiens
CARGLWVASLSRGWFDPW

SEQ ID NO: 49102 - protein, 18 aa, Homo sapiens
CARTINYYDSGEYYFDYW

SEQ ID NO: 49103 - protein, 26 aa, Homo sapiens
CARQLGSCISSTCYNPLNTDNWFDPW

SEQ ID NO: 49104 - protein, 23 aa, Homo sapiens
CARGGKDFWSDYYFDYFYAMDVW

SEQ ID NO: 49105 - protein, 16 aa, Homo sapiens
CATASPLTPTNWFDPW

SEQ ID NO: 49106 - protein, 17 aa, Homo sapiens
CALEVGTYYDSTAFGIW

SEQ ID NO: 49107 - protein, 17 aa, Homo sapiens
CAKDLVRYDILTGTDYW

SEQ ID NO: 49108 - protein, 20 aa, Homo sapiens
CARVPDIVVVPAAKDWFDPW

SEQ ID NO: 49109 - protein, 16 aa, Homo sapiens
CATSSPVTTSYWFDPW

SEQ ID NO: 49110 - protein, 27 aa, Homo sapiens
CARDGLYYDFWSGLGRSYYYYYYMDVW

SEQ ID NO: 49111 - protein, 17 aa, Homo sapiens
CAKDLTIFDIPRNNDYW

SEQ ID NO: 49112 - protein, 24 aa, Homo sapiens
CAKSPGAAYCGGDCYFQTTAFDYW

SEQ ID NO: 49113 - protein, 24 aa, Homo sapiens
CAKAGVYYDSSGYYYSGTREIDYW

SEQ ID NO: 49114 - protein, 23 aa, Homo sapiens
CAKDSARYFDWLLVYYYYGMDVW

SEQ ID NO: 49115 - protein, 18 aa, Homo sapiens
CAREYIWGSYGREAFDIW

SEQ ID NO: 49116 - protein, 19 aa, Homo sapiens
CATFRGYSYGLYYYYMDVW

SEQ ID NO: 49117 - protein, 19 aa, Homo sapiens
CARDFQEALWQGADAFDIW

SEQ ID NO: 49118 - protein, 25 aa, Homo sapiens
CARSLTYYDILTGSPGPVLDWFDPW

SEQ ID NO: 49119 - protein, 16 aa, Homo sapiens
CARPGLYSGYDRLDYW

SEQ ID NO: 49120 - protein, 25 aa, Homo sapiens
CARLQEARITMIVVVIPSYWYFDLW

SEQ ID NO: 49121 - protein, 12 aa, Homo sapiens
CARFLGTGLDYW

SEQ ID NO: 49122 - protein, 16 aa, Homo sapiens
CARPHSGSYSSYFDYW

SEQ ID NO: 49123 - protein, 19 aa, Homo sapiens
CAREVPGFSSSWYDMFDYW

SEQ ID NO: 49124 - protein, 23 aa, Homo sapiens
CAKSGYCSGGSCYTATAFLLDYW

SEQ ID NO: 49125 - protein, 19 aa, Homo sapiens
CAGEMTTVTTRGFLAFDIW

SEQ ID NO: 49126 - protein, 14 aa, Homo sapiens
CAHRREWLRHFDYW

SEQ ID NO: 49127 - protein, 17 aa, Homo sapiens
CARHFDSGYDSDYFDYW

SEQ ID NO: 49128 - protein, 12 aa, Homo sapiens
CQEFGSSPQISF

SEQ ID NO: 49129 - protein, 16 aa, Homo sapiens
CAKAKYGSVWDYFDYW

SEQ ID NO: 49130 - protein, 16 aa, Homo sapiens
CATKAVAGDNDAFDIW

SEQ ID NO: 49131 - protein, 18 aa, Homo sapiens
CAKHLTRYSSSRDAFDIW

SEQ ID NO: 49132 - protein, 21 aa, Homo sapiens
CAKAQLPDYDFWSGYYLHDYW

SEQ ID NO: 49133 - protein, 20 aa, Homo sapiens
CATGPVVVVAATRGHWFDPW

SEQ ID NO: 49134 - protein, 21 aa, Homo sapiens
CTTDPTTPPGTLYYYYYMDVW

SEQ ID NO: 49135 - protein, 16 aa, Homo sapiens
CAMTHYGDYVDAFDIW

SEQ ID NO: 49136 - protein, 21 aa, Homo sapiens
CARRYYDSSGYYYVGGAFDIW

SEQ ID NO: 49137 - protein, 13 aa, Homo sapiens
CSAWDDRLSGVLF

SEQ ID NO: 49138 - protein, 20 aa, Homo sapiens
CARHPKQWLSYVDYYYMDVW

SEQ ID NO: 49139 - protein, 19 aa, Homo sapiens
CARDLGFNDDSSGYYNDYW

SEQ ID NO: 49140 - protein, 22 aa, Homo sapiens
CALIPSAYYDFWSGPAAPFDYW

SEQ ID NO: 49141 - protein, 22 aa, Homo sapiens
CARQGDSSSSRNYYYYYGMDVW

SEQ ID NO: 49142 - protein, 26 aa, Homo sapiens
CARDLWPANRALVPDYYYYYYGMDVW

SEQ ID NO: 49143 - protein, 26 aa, Homo sapiens
CARTTVLRYFDWLFESDNRGYYFDYW

SEQ ID NO: 49144 - protein, 16 aa, Homo sapiens
CARDLAVAGTLELDYW

SEQ ID NO: 49145 - protein, 16 aa, Homo sapiens
CAKGRDSSGWYPFDYW

SEQ ID NO: 49146 - protein, 21 aa, Homo sapiens
CARDGPDFWSGYYRLYGMDVW

SEQ ID NO: 49147 - protein, 23 aa, Homo sapiens
CARQGCSSTSCYTAYYYYGMDVW

SEQ ID NO: 49148 - protein, 12 aa, Homo sapiens
CQSYDISRGTAF

SEQ ID NO: 49149 - protein, 13 aa, Homo sapiens
CAREGSPVPGDYW

SEQ ID NO: 49150 - protein, 20 aa, Homo sapiens
CASESYYDYVWGSSAYFDYW

SEQ ID NO: 49151 - protein, 20 aa, Homo sapiens
CARSELSYSSSWYVYYFDYW

SEQ ID NO: 49152 - protein, 22 aa, Homo sapiens
CARELTTVAGDDYYYYYGMDVW

SEQ ID NO: 49153 - protein, 16 aa, Homo sapiens
CAHRGSTAMVFSFDYW

SEQ ID NO: 49154 - protein, 20 aa, Homo sapiens
CARAPLYYDILTGFPYFDYW

SEQ ID NO: 49155 - protein, 16 aa, Homo sapiens
CAKEAWYSFGDAFDNW

SEQ ID NO: 49156 - protein, 22 aa, Homo sapiens
CARDLAAAGFQNLYNSYAMDVW

SEQ ID NO: 49157 - protein, 17 aa, Homo sapiens
CARDDRGYSYGYPADYW

SEQ ID NO: 49158 - protein, 17 aa, Homo sapiens
CAPRGIGGSYEDYFDYW

SEQ ID NO: 49159 - protein, 18 aa, Homo sapiens
CARLSRTIFGVVSAFDIW

SEQ ID NO: 49160 - protein, 20 aa, Homo sapiens
CARGGGRPWLVLYYYGMDVW

SEQ ID NO: 49161 - protein, 19 aa, Homo sapiens
CARHHTIYTVVLRDPFDYW

SEQ ID NO: 49162 - protein, 22 aa, Homo sapiens
CAREPETACSGGSCFQGWFDPW

SEQ ID NO: 49163 - protein, 19 aa, Homo sapiens
CAKDYGSGSYYMVTSFDYW

SEQ ID NO: 49164 - protein, 14 aa, Homo sapiens
CAKVGGDTLGFDPW

SEQ ID NO: 49165 - protein, 24 aa, Homo sapiens
CARGTVVPAAIKGRYYYYYYMDVW

SEQ ID NO: 49166 - protein, 21 aa, Homo sapiens
CARLREGAAAGTTDYWYFDLW

SEQ ID NO: 49167 - protein, 19 aa, Homo sapiens
CARGMGSSGYYYVWAFDIW

SEQ ID NO: 49168 - protein, 14 aa, Homo sapiens
CARDTGGWLFPDYW

SEQ ID NO: 49169 - protein, 16 aa, Homo sapiens
CAKDGTAMITGYFDYW

SEQ ID NO: 49170 - protein, 19 aa, Homo sapiens
CARGRGAYSTGWLLPFDYW

SEQ ID NO: 49171 - protein, 20 aa, Homo sapiens
CASSIYYYDSSGSSGAFDIW

SEQ ID NO: 49172 - protein, 20 aa, Homo sapiens
CARGHYSSSWYGPKWYFDLW

SEQ ID NO: 49173 - protein, 17 aa, Homo sapiens
CARGVSPHGYNYWFDPW

SEQ ID NO: 49174 - protein, 23 aa, Homo sapiens
CARESSSWYRFSAEPHYWYFDLW

SEQ ID NO: 49175 - protein, 16 aa, Homo sapiens
CARTPYTVTTNYFDYW

SEQ ID NO: 49176 - protein, 29 aa, Homo sapiens
CAKDSMYYDFWSGYLASPGGYYYYYMDVW

SEQ ID NO: 49177 - protein, 24 aa, Homo sapiens
CARDSAPSYDYVWGSYRLGYFDYW

SEQ ID NO: 49178 - protein, 21 aa, Homo sapiens
CARGSIRITMIVVVPNWFDPW

SEQ ID NO: 49179 - protein, 20 aa, Homo sapiens
CARLGRAGALLRSLEWFDPW

SEQ ID NO: 49180 - protein, 18 aa, Homo sapiens
CARGVVGSGYYDNWFDPW

SEQ ID NO: 49181 - protein, 20 aa, Homo sapiens
CAREQTNYDGSGYYPYFDYW

SEQ ID NO: 49182 - protein, 22 aa, Homo sapiens
CARCFWGFLEWLSPLLVWFDPW

SEQ ID NO: 49183 - protein, 26 aa, Homo sapiens
CARDRSVRATTKSCRGGSCYLRFDFW

SEQ ID NO: 49184 - protein, 22 aa, Homo sapiens
CARVPPIQGSDSYYYYYYMDVW

SEQ ID NO: 49185 - protein, 12 aa, Homo sapiens
CQQRGTWPRVTF

SEQ ID NO: 49186 - protein, 29 aa, Homo sapiens
CAKVPLGGDYDFWSGYYTFGGPPLSFDYW

SEQ ID NO: 49187 - protein, 13 aa, Homo sapiens
CASSWEDFWFDPW

SEQ ID NO: 49188 - protein, 17 aa, Homo sapiens
CARSVQAADLYNWFDPW

SEQ ID NO: 49189 - protein, 25 aa, Homo sapiens
CARETDGDPEMVPPNIATPYYFDNW

SEQ ID NO: 49190 - protein, 16 aa, Homo sapiens
CARSEGGDYDEYFQHW

SEQ ID NO: 49191 - protein, 26 aa, Homo sapiens
CARDSAGVVPAAMGALFYYYYYMDVW

SEQ ID NO: 49192 - protein, 22 aa, Homo sapiens
CARDERGSDTSGYYSPYYFDSW

SEQ ID NO: 49193 - protein, 19 aa, Homo sapiens
CAMLGYGSGSYSILPFDYW

SEQ ID NO: 49194 - protein, 20 aa, Homo sapiens
CAGTYYYDSSGYYKLGMDYW

SEQ ID NO: 49195 - protein, 16 aa, Homo sapiens
CAKGPSIPGWQVFDYW

SEQ ID NO: 49196 - protein, 27 aa, Homo sapiens
CAKDLAVVDTIFGVVIRDYPDDAFDIW

SEQ ID NO: 49197 - protein, 21 aa, Homo sapiens
CTTAYCGGDCYVTLWWAFDIW

SEQ ID NO: 49198 - protein, 19 aa, Homo sapiens
CARLPPMIVVVSMDAFDIW

SEQ ID NO: 49199 - protein, 19 aa, Homo sapiens
CARDARYCSSTSCSDLDYW

SEQ ID NO: 49200 - protein, 23 aa, Homo sapiens
CAHRQGLVFQWFGELSSEYFQHW

SEQ ID NO: 49201 - protein, 19 aa, Homo sapiens
CAKDGPWDDYGDYGPFDYW

SEQ ID NO: 49202 - protein, 15 aa, Homo sapiens
CARDLRNYVVPLDYW

SEQ ID NO: 49203 - protein, 18 aa, Homo sapiens
CAKGVVDTAMVRTPFDYW

SEQ ID NO: 49204 - protein, 20 aa, Homo sapiens
CARVNYGSGSYSFYWYFDLW

SEQ ID NO: 49205 - protein, 12 aa, Homo sapiens
CTRDPGGGFDPW

SEQ ID NO: 49206 - protein, 16 aa, Homo sapiens
CAKEVSQWLINWFDPW

SEQ ID NO: 49207 - protein, 18 aa, Homo sapiens
CARHRPQWLERSNWFDPW

SEQ ID NO: 49208 - protein, 16 aa, Homo sapiens
CARGDYGGNSDAFDIW

SEQ ID NO: 49209 - protein, 23 aa, Homo sapiens
CARDRLFRYNRSSGVYYYYMDNW

SEQ ID NO: 49210 - protein, 17 aa, Homo sapiens
CATLTITMIVVNAFDIW

SEQ ID NO: 49211 - protein, 12 aa, Homo sapiens
CAREHWGPTDYW

SEQ ID NO: 49212 - protein, 24 aa, Homo sapiens
CARIRHYGSGSYYLGYYYYYMDVW

SEQ ID NO: 49213 - protein, 23 aa, Homo sapiens
CARSIFSIVATITGYYYYYMDVW

SEQ ID NO: 49214 - protein, 16 aa, Homo sapiens
CVRGSGGYYISRLDYW

SEQ ID NO: 49215 - protein, 23 aa, Homo sapiens
CASEGVWSGYPKTPYYYYGMDVW

SEQ ID NO: 49216 - protein, 16 aa, Homo sapiens
CAKLSYDFWSSYFNSW

SEQ ID NO: 49217 - protein, 18 aa, Homo sapiens
CTRPLGVESGQSDAFDIW

SEQ ID NO: 49218 - protein, 16 aa, Homo sapiens
CARIAVSDALRWFDPW

SEQ ID NO: 49219 - protein, 17 aa, Homo sapiens
CARAPLWFGVAHWFDPW

SEQ ID NO: 49220 - protein, 15 aa, Homo sapiens
CARDCRGTTCYPDSW

SEQ ID NO: 49221 - protein, 18 aa, Homo sapiens
CARDPAYYYDTLSAMDVW

SEQ ID NO: 49222 - protein, 24 aa, Homo sapiens
CARDFPPGGYYDFWSGPSRWFDPW

SEQ ID NO: 49223 - protein, 17 aa, Homo sapiens
CAKDRRKYDYGDDFDYW

SEQ ID NO: 49224 - protein, 23 aa, Homo sapiens
CAKDGVVTIFGVVIIPHTPFDYW

SEQ ID NO: 49225 - protein, 18 aa, Homo sapiens
CARDKGYYDSRDTSFDYW

SEQ ID NO: 49226 - protein, 20 aa, Homo sapiens
CAAAEDSSGYYRKDGQFDPW

SEQ ID NO: 49227 - protein, 22 aa, Homo sapiens
CARIPPYYYDSSGLATDAFDIW

SEQ ID NO: 49228 - protein, 17 aa, Homo sapiens
CAHAVLAYRVPPYFDYW

SEQ ID NO: 49229 - protein, 22 aa, Homo sapiens
CARARRGGATIFGVVIGAFDYW

SEQ ID NO: 49230 - protein, 25 aa, Homo sapiens
CATLGYYYDSSGYYRAHPKYYFDYW

SEQ ID NO: 49231 - protein, 22 aa, Homo sapiens
CARVNTLYGSGTYPRYNWLDPW

SEQ ID NO: 49232 - protein, 21 aa, Homo sapiens
CARGHSYDFWSGGIRNWFDPW

SEQ ID NO: 49233 - protein, 19 aa, Homo sapiens
CAHFGDYYDSSGYATFDYW

SEQ ID NO: 49234 - protein, 15 aa, Homo sapiens
CAHRSEPHIGGYDYW

SEQ ID NO: 49235 - protein, 19 aa, Homo sapiens
CAKVHYYYDSYGYYYFDYW

SEQ ID NO: 49236 - protein, 15 aa, Homo sapiens
CARGGQPLNARFRYW

SEQ ID NO: 49237 - protein, 21 aa, Homo sapiens
CARIGVYSSSSELYYYGMDVW

SEQ ID NO: 49238 - protein, 21 aa, Homo sapiens
CARDYDYSNYEIDYYYGMDVW

SEQ ID NO: 49239 - protein, 17 aa, Homo sapiens
CARYGGSTLAQNWFDSW

SEQ ID NO: 49240 - protein, 20 aa, Homo sapiens
CARAFEQQLVFNYYYYMDVW

SEQ ID NO: 49241 - protein, 20 aa, Homo sapiens
CARGGYSSSWYGELNWFDPW

SEQ ID NO: 49242 - protein, 22 aa, Homo sapiens
CARLMWRNPYARSWYFDYFDPW

SEQ ID NO: 49243 - protein, 24 aa, Homo sapiens
CARVFRLKPTPVAIFGVVTWFDPW

SEQ ID NO: 49244 - protein, 19 aa, Homo sapiens
CARGGSYSSGWDNNWFDPW

SEQ ID NO: 49245 - protein, 18 aa, Homo sapiens
CAKGPAFSGYSLYYFDYW

SEQ ID NO: 49246 - protein, 20 aa, Homo sapiens
CARDRAYDSSGSYHGNFDSW

SEQ ID NO: 49247 - protein, 21 aa, Homo sapiens
CARDQARVLGQWLVQYWFDPW

SEQ ID NO: 49248 - protein, 21 aa, Homo sapiens
CARGSRKDYDGSGYYYYFDYW

SEQ ID NO: 49249 - protein, 22 aa, Homo sapiens
CARAYPVEYYDFWSGRLWFDPW

SEQ ID NO: 49250 - protein, 11 aa, Homo sapiens
CMQGTHRRESF

SEQ ID NO: 49251 - protein, 19 aa, Homo sapiens
CARTPWEGEFYYYYGMDVW

SEQ ID NO: 49252 - protein, 15 aa, Homo sapiens
CARPGIVGPPFWDYW

SEQ ID NO: 49253 - protein, 18 aa, Homo sapiens
CAKDAKATSGSSSPFDYW

SEQ ID NO: 49254 - protein, 26 aa, Homo sapiens
CARETTERITMVRGVITVYYYYMDVW

SEQ ID NO: 49255 - protein, 17 aa, Homo sapiens
CARARDWDLLSFLFDSW

SEQ ID NO: 49256 - protein, 20 aa, Homo sapiens
CATVHMVRRAYYYYYGMDVW

SEQ ID NO: 49257 - protein, 16 aa, Homo sapiens
CAKDASQHDYQYFDYW

SEQ ID NO: 49258 - protein, 17 aa, Homo sapiens
CARAREDSQFHVYFDYW

SEQ ID NO: 49259 - protein, 13 aa, Homo sapiens
CAKFPDGDYVYYW

SEQ ID NO: 49260 - protein, 19 aa, Homo sapiens
CAKDSDSSGYYQGDAFDIW

SEQ ID NO: 49261 - protein, 16 aa, Homo sapiens
CARHLHTWNYAPFDPW

SEQ ID NO: 49262 - protein, 18 aa, Homo sapiens
CARAWEYYGSGSYYPSYW

SEQ ID NO: 49263 - protein, 20 aa, Homo sapiens
CARVSYSSSWPMYYYYMDVW

SEQ ID NO: 49264 - protein, 15 aa, Homo sapiens [sequence omitted]

SEQ ID NO: 49265 - protein, 24 aa, Homo sapiens
CARERLSIAVAGTHYYYYYGMDVW

SEQ ID NO: 49266 - protein, 21 aa, Homo sapiens
CTREIIRFEVGRRPYRWLDPW

SEQ ID NO: 49267 - protein, 15 aa, Homo sapiens
CARVNFAAAYAFDFW

SEQ ID NO: 49268 - protein, 23 aa, Homo sapiens
CARNLGVINYYDSSGAGDYFDYW

SEQ ID NO: 49269 - protein, 14 aa, Homo sapiens
CARSSASFDAFETW

SEQ ID NO: 49270 - protein, 18 aa, Homo sapiens
CARNHVYYYDSSGPFDYW

SEQ ID NO: 49271 - protein, 19 aa, Homo sapiens
CARQGRRWLQLHPDWFDPW

SEQ ID NO: 49272 - protein, 15 aa, Homo sapiens
CASLRYGDYSPFDYW

SEQ ID NO: 49273 - protein, 20 aa, Homo sapiens
CARGNGDFWSGYSYWYFDLW

SEQ ID NO: 49274 - protein, 23 aa, Homo sapiens
CAKDGGGIFSRIGPYYYYGMDVW

SEQ ID NO: 49275 - protein, 25 aa, Homo sapiens
CARESPSHMVRGVIRGYYYYYMDVW

SEQ ID NO: 49276 - protein, 21 aa, Homo sapiens
CARDLTVSVWFGESPYYMDVW

SEQ ID NO: 49277 - protein, 13 aa, Homo sapiens
CQQCSNRPLMYTF

SEQ ID NO: 49278 - protein, 22 aa, Homo sapiens
CARDPTRGDGYNLDYYYGMDVW

SEQ ID NO: 49279 - protein, 15 aa, Homo sapiens
CAKDSGVDSGSIDYW

SEQ ID NO: 49280 - protein, 12 aa, Homo sapiens
CARDGARAFDIW

SEQ ID NO: 49281 - protein, 21 aa, Homo sapiens
CAIADGYYYDSSGPNDAFDIW

SEQ ID NO: 49282 - protein, 25 aa, Homo sapiens
CARDLREVSKWELLGAYYYYGMDVW

SEQ ID NO: 49283 - protein, 15 aa, Homo sapiens
CAKDVNGYYGPLDYW

SEQ ID NO: 49284 - protein, 17 aa, Homo sapiens
CASLLMTGGSYGAFDIW

SEQ ID NO: 49285 - protein, 18 aa, Homo sapiens
CARAWDIAVAGIRWFDPW

SEQ ID NO: 49286 - protein, 17 aa, Homo sapiens
CATPGYSYGRDGAFDIW

SEQ ID NO: 49287 - protein, 20 aa, Homo sapiens
CSRIYCGGDCYSGQWYFELW

SEQ ID NO: 49288 - protein, 18 aa, Homo sapiens
CAKDMIGRGIAVAPFDYW

SEQ ID NO: 49289 - protein, 12 aa, Homo sapiens
CASIAARRGDYW

SEQ ID NO: 49290 - protein, 23 aa, Homo sapiens
CARATDYGDYGVVYYYYYYMDVW

SEQ ID NO: 49291 - protein, 21 aa, Homo sapiens
CASNGLGGIAYGSGSYALDVW

SEQ ID NO: 49292 - protein, 20 aa, Homo sapiens
CARGHQQQLVHYYYYYMDVW

SEQ ID NO: 49293 - protein, 15 aa, Homo sapiens
CAKDSSGWHRVVDYW

SEQ ID NO: 49294 - protein, 19 aa, Homo sapiens
CARAKQEWLAYEKYYFDYW

SEQ ID NO: 49295 - protein, 25 aa, Homo sapiens
CARDLRDYYDSSGYSPYYYYGMDVW

SEQ ID NO: 49296 - protein, 15 aa, Homo sapiens
CQSYDAFNQEGHWVF

SEQ ID NO: 49297 - protein, 18 aa, Homo sapiens
CARDARDSGSYVWPFDYW

SEQ ID NO: 49298 - protein, 21 aa, Homo sapiens
CARDWLRYSSSLYGNVWFDPW

SEQ ID NO: 49299 - protein, 13 aa, Homo sapiens
CARYSSSSYLDSW

SEQ ID NO: 49300 - protein, 23 aa, Homo sapiens
CARAGGIEVTIFGVVIIGWFDYW

SEQ ID NO: 49301 - protein, 16 aa, Homo sapiens
CAKDRRVGVAGTFDYW

SEQ ID NO: 49302 - protein, 16 aa, Homo sapiens
CVKEADHGYYRTADYW

SEQ ID NO: 49303 - protein, 25 aa, Homo sapiens
CARGRSSISMIVVVFTGASFYFDYW

SEQ ID NO: 49304 - protein, 23 aa, Homo sapiens
CAWSPQVVVPAATGYYYYGMDVW

SEQ ID NO: 49305 - protein, 17 aa, Homo sapiens
CARSAGSGYHFRAFDSW

SEQ ID NO: 49306 - protein, 22 aa, Homo sapiens
CARHNGYYDSSGYSGGDSFDIW

SEQ ID NO: 49307 - protein, 23 aa, Homo sapiens
CAKNGHYVWGSYRLVRFDAFDIW

SEQ ID NO: 49308 - protein, 24 aa, Homo sapiens
CAKDQQYYDFWSGTRDYYYGMDVW

SEQ ID NO: 49309 - protein, 26 aa, Homo sapiens
CAKDLFCSSPNCYELIPKYYYGMDVW

SEQ ID NO: 49310 - protein, 23 aa, Homo sapiens
CAKDIEYYYGSGSYYNHYYFDYW

SEQ ID NO: 49311 - protein, 26 aa, Homo sapiens
CARTIAPSSYYTFWNGFYNSAAFDYW

SEQ ID NO: 49312 - protein, 13 aa, Homo sapiens
CASAWGAPLFDSW

SEQ ID NO: 49313 - protein, 22 aa, Homo sapiens
CARAQTITIFGVVTTSGWFDPW

SEQ ID NO: 49314 - protein, 27 aa, Homo sapiens
CAKEGGASYYDVLTGYYVDYFYYMDVW

SEQ ID NO: 49315 - protein, 27 aa, Homo sapiens
CARGNVDTAMVVGGGVVYYYYYYMDVW

SEQ ID NO: 49316 - protein, 24 aa, Homo sapiens
CARKAGHDFGDRPTYYYSYYMDVW

SEQ ID NO: 49317 - protein, 13 aa, Homo sapiens
CARRTTTGPFDTW

SEQ ID NO: 49318 - protein, 25 aa, Homo sapiens
CATGERITMIVVVMGGRSSGAFDIW

SEQ ID NO: 49319 - protein, 16 aa, Homo sapiens
CARENIVVAGSGVDYW

SEQ ID NO: 49320 - protein, 16 aa, Homo sapiens
CARDSQEGSYDAFDIW

SEQ ID NO: 49321 - protein, 16 aa, Homo sapiens
CAKEQHYYDRSGIDYW

SEQ ID NO: 49322 - protein, 21 aa, Homo sapiens
CARAEDDRPLSYYYYYYMDVW

SEQ ID NO: 49323 - protein, 21 aa, Homo sapiens
CAKEPRIQLWLLSHEDAFDIW

SEQ ID NO: 49324 - protein, 23 aa, Homo sapiens
CAKDAGYCSSTSCYKLTNYFDYW

SEQ ID NO: 49325 - protein, 18 aa, Homo sapiens
CAKNRYSYGYTAVQYDYW

SEQ ID NO: 49326 - protein, 20 aa, Homo sapiens
CARLIQVYDRGWYGDWFDPW

SEQ ID NO: 49327 - protein, 18 aa, Homo sapiens
CARDTYDSSGYSLGFDYW

SEQ ID NO: 49328 - protein, 22 aa, Homo sapiens
CAKDIRSGDFWSGYPHDAFDIW

SEQ ID NO: 49329 - protein, 23 aa, Homo sapiens
CARARGYYDFWSGSPNYYYMDVW

SEQ ID NO: 49330 - protein, 16 aa, Homo sapiens
CARIQRWHHGGWFDPW

SEQ ID NO: 49331 - protein, 18 aa, Homo sapiens
CARAPYRPPYYYYYMDVW

SEQ ID NO: 49332 - protein, 17 aa, Homo sapiens
CARDGSSSWYGGDFDYW

SEQ ID NO: 49333 - protein, 24 aa, Homo sapiens
CARGRPRSYYYDSSGYYGYYFDYW

SEQ ID NO: 49334 - protein, 17 aa, Homo sapiens
CAKEPPGITGSNWFDPW

SEQ ID NO: 49335 - protein, 20 aa, Homo sapiens
CASPRVDFWSGYYMYGMDVW

SEQ ID NO: 49336 - protein, 21 aa, Homo sapiens
CAKAIRGGDYYYDSSGYYDYW

SEQ ID NO: 49337 - protein, 21 aa, Homo sapiens
CARDFRDYGDEVYYYYGMDVW

SEQ ID NO: 49338 - protein, 23 aa, Homo sapiens
CARRVWGPRFDRTGYYPKYFDRW

SEQ ID NO: 49339 - protein, 23 aa, Homo sapiens
CAKDEPYCTNGVCYTSYYGMDVW

SEQ ID NO: 49340 - protein, 24 aa, Homo sapiens
CARGQVYSSSPGVLSPRYNWFDPW

SEQ ID NO: 49341 - protein, 21 aa, Homo sapiens
CAREVGIAARYYYYYYYMDVW

SEQ ID NO: 49342 - protein, 25 aa, Homo sapiens
CARELVVYVAFLFGVRQQLGWFDPW

SEQ ID NO: 49343 - protein, 17 aa, Homo sapiens
CAREIGVGYHTDSLDVW

SEQ ID NO: 49344 - protein, 24 aa, Homo sapiens
CARAATSPRIAAAGLVYYYYMDVW

SEQ ID NO: 49345 - protein, 24 aa, Homo sapiens
CAKGPRFLEWLLSIDYYYYGMDVW

SEQ ID NO: 49346 - protein, 17 aa, Homo sapiens
CAKEGTLSAVTPFFDYW

SEQ ID NO: 49347 - protein, 16 aa, Homo sapiens
CTKGSSGSAYSGLDYW

SEQ ID NO: 49348 - protein, 14 aa, Homo sapiens
CAKDYGDYGALDYW

SEQ ID NO: 49349 - protein, 18 aa, Homo sapiens
CAKLDPEYSSGWYVFDYW

SEQ ID NO: 49350 - protein, 15 aa, Homo sapiens
CARDGLGDETTSDYW

SEQ ID NO: 49351 - protein, 18 aa, Homo sapiens
CTRQVVDIVATTTPIDYW

SEQ ID NO: 49352 - protein, 18 aa, Homo sapiens
CARGRGAYSFYYRYIDVW

SEQ ID NO: 49353 - protein, 19 aa, Homo sapiens
CARSACTNGVCYVPPFDIW

SEQ ID NO: 49354 - protein, 15 aa, Homo sapiens
CARATPGTGWLIDYW

SEQ ID NO: 49355 - protein, 13 aa, Homo sapiens
CQHYHNLPPRLTF

SEQ ID NO: 49356 - protein, 27 aa, Homo sapiens
CAKEGGAYCGGDCYWLGAYYYYGMDVW

SEQ ID NO: 49357 - protein, 17 aa, Homo sapiens
CARDGGVAADNNWFDPW

SEQ ID NO: 49358 - protein, 22 aa, Homo sapiens
CARRHYDFWSGYPPLVGAFDIW

SEQ ID NO: 49359 - protein, 18 aa, Homo sapiens
CGKGMLNYYDSSRPFDFW

SEQ ID NO: 49360 - protein, 21 aa, Homo sapiens
CAKSPLTSRTYYYGSGGFDPW

SEQ ID NO: 49361 - protein, 16 aa, Homo sapiens
CARTLWFGDLAWFDPW

SEQ ID NO: 49362 - protein, 24 aa, Homo sapiens
CARGRSTGIAVAGRVHYYYYMDVW

SEQ ID NO: 49363 - protein, 19 aa, Homo sapiens
CARGAEWLLNTSPDWFDPW

SEQ ID NO: 49364 - protein, 18 aa, Homo sapiens
CARWTSQDGYFLHGFDIW

SEQ ID NO: 49365 - protein, 21 aa, Homo sapiens
CARDEAYCGGDCSDPDWFDPW

SEQ ID NO: 49366 - protein, 26 aa, Homo sapiens
CAKDGLLYDSSGYYYQPYYYYGMDVW

SEQ ID NO: 49367 - protein, 18 aa, Homo sapiens
CAKDIPPKGLLHDAFDIW

SEQ ID NO: 49368 - protein, 26 aa, Homo sapiens
CARDLLMDTIFGVVITDYYYYYMDVW

SEQ ID NO: 49369 - protein, 17 aa, Homo sapiens
CARAFYVWLRVSWFDPW

SEQ ID NO: 49370 - protein, 18 aa, Homo sapiens
CTGTLGYSYGPGRAGDYW

SEQ ID NO: 49371 - protein, 18 aa, Homo sapiens
CARDWGSSGSSHDAFDMW

SEQ ID NO: 49372 - protein, 24 aa, Homo sapiens
CARLGRNIVVVVAVPYYYYYMDVW

SEQ ID NO: 49373 - protein, 23 aa, Homo sapiens
CAKDLLPTMIVVVITGLGAFDIW

SEQ ID NO: 49374 - protein, 27 aa, Homo sapiens
CAREEARDDFWSGYYASSYYYYGMDVW

SEQ ID NO: 49375 - protein, 22 aa, Homo sapiens
CAKDLALTPYYYDSSGSVFDYW

SEQ ID NO: 49376 - protein, 23 aa, Homo sapiens
CARGSVYYDILTGSHYYYYMDVW

SEQ ID NO: 49377 - protein, 16 aa, Homo sapiens
CAREGGDISSSEVDYW

SEQ ID NO: 49378 - protein, 17 aa, Homo sapiens
CARHQLLIVGATPGDYW

SEQ ID NO: 49379 - protein, 17 aa, Homo sapiens
CAKSARRGYTYSQFDSW

SEQ ID NO: 49380 - protein, 20 aa, Homo sapiens
CAGDFWSAHAAPYYYGMDVW

SEQ ID NO: 49381 - protein, 22 aa, Homo sapiens
CARGLREAIFGVVTYPSTFDYW

SEQ ID NO: 49382 - protein, 20 aa, Homo sapiens
CARSPPRRDFVVVTNAFDVW

SEQ ID NO: 49383 - protein, 17 aa, Homo sapiens
CARRYCSGGSCGSFDYW

SEQ ID NO: 49384 - protein, 16 aa, Homo sapiens
CARARIVVVIGPFDYW

SEQ ID NO: 49385 - protein, 19 aa, Homo sapiens
CARARITIFGVVIGAFDIW

SEQ ID NO: 49386 - protein, 25 aa, Homo sapiens
CASSPYYDFWSGYRDYYYYYGMDVW

SEQ ID NO: 49387 - protein, 21 aa, Homo sapiens
CARDPWTYYYDSSHPDAFDIW

SEQ ID NO: 49388 - protein, 24 aa, Homo sapiens
CARGSLTYYYGSGSYDYYYGMDVW

SEQ ID NO: 49389 - protein, 27 aa, Homo sapiens
CARGVPLQEIITIFGVVKDYYYGMDVW

SEQ ID NO: 49390 - protein, 13 aa, Homo sapiens
CARKDYTKNFDYW

SEQ ID NO: 49391 - protein, 15 aa, Homo sapiens
CARDWGRRHYYMDVW

SEQ ID NO: 49392 - protein, 21 aa, Homo sapiens
CAKFQRITMIVVVIEGAFDIW

SEQ ID NO: 49393 - protein, 22 aa, Homo sapiens
CARAGPRFPERGYSYGPYFDYW

SEQ ID NO: 49394 - protein, 21 aa, Homo sapiens
CARDSRPRGFGTAMVPNFDYW

SEQ ID NO: 49395 - protein, 15 aa, Homo sapiens
CVRHDYDDRDAFDLW

SEQ ID NO: 49396 - protein, 21 aa, Homo sapiens
CARDRYDSSGYRDTPNYFDYW

SEQ ID NO: 49397 - protein, 18 aa, Homo sapiens
CARQGPQIRKLFNWFDPW

SEQ ID NO: 49398 - protein, 28 aa, Homo sapiens
CARGLSYSHITIFGVVIPYYYYYYMDVW

SEQ ID NO: 49399 - protein, 20 aa, Homo sapiens
CARTLRYFDWLLPKYYFDYW

SEQ ID NO: 49400 - protein, 14 aa, Homo sapiens
CSSYAGSNNSDVIF

SEQ ID NO: 49401 - protein, 21 aa, Homo sapiens
CARSPTLYDFWSGYSCYFDYW

SEQ ID NO: 49402 - protein, 18 aa, Homo sapiens
CARERWGGDSSGYRFDYW

SEQ ID NO: 49403 - protein, 16 aa, Homo sapiens
CAHRPGGWLQPYFDYW

SEQ ID NO: 49404 - protein, 17 aa, Homo sapiens
CARDLGGVARPYAFDIW

SEQ ID NO: 49405 - protein, 20 aa, Homo sapiens
CARDRRGGLGPEPDWYFDLW

SEQ ID NO: 49406 - protein, 18 aa, Homo sapiens
CAKDLARWELLPRAFDLW

SEQ ID NO: 49407 - protein, 16 aa, Homo sapiens
CAREFFGSGLDWFDPW

SEQ ID NO: 49408 - protein, 18 aa, Homo sapiens
CARDNPGDWGFGAVFDYW

SEQ ID NO: 49409 - protein, 23 aa, Homo sapiens
CARDHPLRLGELSLSAFDAFDIW

SEQ ID NO: 49410 - protein, 22 aa, Homo sapiens
CARIAALYCSSTSCYGWYFDYW

SEQ ID NO: 49411 - protein, 21 aa, Homo sapiens
CARAQFDDSSGYYFGWYFDYW

SEQ ID NO: 49412 - protein, 23 aa, Homo sapiens
CARMHAYYYDSSGYTIYPHFDYW

SEQ ID NO: 49413 - protein, 22 aa, Homo sapiens
CAKDPSYCSGGSCYPLTYFDYW

SEQ ID NO: 49414 - protein, 25 aa, Homo sapiens
CAKDQLDPIMITFGGVIALGGFDYW

SEQ ID NO: 49415 - protein, 15 aa, Homo sapiens
CARDGSSSSWYSNYW

SEQ ID NO: 49416 - protein, 16 aa, Homo sapiens
CARAQFTYGYGNFDYW

SEQ ID NO: 49417 - protein, 22 aa, Homo sapiens
CVKKSGWGVGVTGACDCYFDNW

SEQ ID NO: 49418 - protein, 23 aa, Homo sapiens
CARAGSSDNLWGIISPGGWFDPW

SEQ ID NO: 49419 - protein, 18 aa, Homo sapiens
CVRPYFIVRPGTTPFDIW

SEQ ID NO: 49420 - protein, 21 aa, Homo sapiens
CARRSAVYYGSGSYYRYIDYW

SEQ ID NO: 49421 - protein, 20 aa, Homo sapiens
CAKSGAGYGANYYYYRMDVW

SEQ ID NO: 49422 - protein, 21 aa, Homo sapiens
CASTRRIEYSYGYSETNFDYW

SEQ ID NO: 49423 - protein, 25 aa, Homo sapiens
CAKDIGITFGGVIVPHFGLGAFDIW

SEQ ID NO: 49424 - protein, 16 aa, Homo sapiens
CAKETSTSSRGSFDIW

SEQ ID NO: 49425 - protein, 19 aa, Homo sapiens
CARDEKGDLRWYIWYFDLW

SEQ ID NO: 49426 - protein, 23 aa, Homo sapiens
CAREGSLGGRIAAAGYWDYMDVW

SEQ ID NO: 49427 - protein, 17 aa, Homo sapiens
CASIAVAGMGGWTFDYW

SEQ ID NO: 49428 - protein, 22 aa, Homo sapiens
CARMHFSSSWPPGYYYYYMDVW

SEQ ID NO: 49429 - protein, 19 aa, Homo sapiens
CAKALRVAGYLPPRLPDYW

SEQ ID NO: 49430 - protein, 22 aa, Homo sapiens
CARAGYYDFWSGYYIPYYFDYW

SEQ ID NO: 49431 - protein, 24 aa, Homo sapiens
CARDLAFKTIFGVVIKAPDYFDYW

SEQ ID NO: 49432 - protein, 19 aa, Homo sapiens
CARDHKQWLVLPPSWFDYW

SEQ ID NO: 49433 - protein, 26 aa, Homo sapiens
CARAGTQARLLRIMVYGPIPDAFDIW

SEQ ID NO: 49434 - protein, 12 aa, Homo sapiens
CTTAGNYYFDYW

SEQ ID NO: 49435 - protein, 14 aa, Homo sapiens
CARWESSSHGFDPW

SEQ ID NO: 49436 - protein, 16 aa, Homo sapiens
CAKAEMATIRAAFDYW

SEQ ID NO: 49437 - protein, 22 aa, Homo sapiens
CTRHRESVVVVAATTYNWFDPW

SEQ ID NO: 49438 - protein, 20 aa, Homo sapiens
CAKESMIVVVFLRYNWFDPW

SEQ ID NO: 49439 - protein, 27 aa, Homo sapiens
CAGDPEVRYCSGISCYSDYHYYGMDVW

SEQ ID NO: 49440 - protein, 26 aa, Homo sapiens
CARADVLRYFDWTQGKYYYYYYMDVW

SEQ ID NO: 49441 - protein, 20 aa, Homo sapiens
CARQKYYDFSGYYPREVDYW

SEQ ID NO: 49442 - protein, 18 aa, Homo sapiens
CARGRGYYDSSGYYLDYW

SEQ ID NO: 49443 - protein, 21 aa, Homo sapiens
CASLTLNSSGWTPPGWYFDLW

SEQ ID NO: 49444 - protein, 19 aa, Homo sapiens
CARLQYSSVLLTRDLFDPW

SEQ ID NO: 49445 - protein, 21 aa, Homo sapiens
CARAVVWSYPPGYYYYYMDVW

SEQ ID NO: 49446 - protein, 17 aa, Homo sapiens
CARDSKDSSSWTYFDYW

SEQ ID NO: 49447 - protein, 19 aa, Homo sapiens
CVKDIYVRLAVAGTGFDHW

SEQ ID NO: 49448 - protein, 19 aa, Homo sapiens
CARGGYGSGSLTPYYFDYW

SEQ ID NO: 49449 - protein, 29 aa, Homo sapiens
CAKDWRYYDILTGYLKHPNYYYYYYMDVW

SEQ ID NO: 49450 - protein, 20 aa, Homo sapiens
CARLYYDSSDPGANWYFDLW

SEQ ID NO: 49451 - protein, 16 aa, Homo sapiens
CAKGASLVRGEYFQHW

SEQ ID NO: 49452 - protein, 19 aa, Homo sapiens
CARIRMNWNHNEGNYFDYW

SEQ ID NO: 49453 - protein, 24 aa, Homo sapiens
CARQYSSGYYWARNPRTYYYMDVW

SEQ ID NO: 49454 - protein, 19 aa, Homo sapiens
CARSDDSSGYYYHDAFDIW

SEQ ID NO: 49455 - protein, 28 aa, Homo sapiens
CARDPKTQYYYDSSGYYPPDYYYGMDVW

SEQ ID NO: 49456 - protein, 21 aa, Homo sapiens
CAKRSGAYCGGDCAGGQFDYW

SEQ ID NO: 49457 - protein, 20 aa, Homo sapiens
CARDKTICDSSGCYSVFDYW

SEQ ID NO: 49458 - protein, 26 aa, Homo sapiens
CARGVGDYYDSSGYFTRHYYYYMDVW

SEQ ID NO: 49459 - protein, 14 aa, Homo sapiens
CAHRPPDSNHIDYW

SEQ ID NO: 49460 - protein, 15 aa, Homo sapiens
CARDAWDLLYRFDHW

SEQ ID NO: 49461 - protein, 23 aa, Homo sapiens
CARDSRYYYDSSGYLMSSYFDYW

SEQ ID NO: 49462 - protein, 16 aa, Homo sapiens
CARDWRFGDPQPFDYW

SEQ ID NO: 49463 - protein, 21 aa, Homo sapiens
CARVGRGYCSGGSCQHAFDIW

SEQ ID NO: 49464 - protein, 23 aa, Homo sapiens
CARHGSLDTIFGVVIIPDAFDIW

SEQ ID NO: 49465 - protein, 18 aa, Homo sapiens
CAIFTDTTTSTSYFFDLW

SEQ ID NO: 49466 - protein, 21 aa, Homo sapiens
CAREGTYYDFWSGTPDVFDIW

SEQ ID NO: 49467 - protein, 20 aa, Homo sapiens
CAKGTALYSSSWYDDGIDYW

SEQ ID NO: 49468 - protein, 25 aa, Homo sapiens
CARRTGGVLHPIILLPYYYYYMDVW

SEQ ID NO: 49469 - protein, 16 aa, Homo sapiens
CARHLPNWGHYYFDFW

SEQ ID NO: 49470 - protein, 20 aa, Homo sapiens
CARRARVITFGGVIVIVDYW

SEQ ID NO: 49471 - protein, 19 aa, Homo sapiens
CASWKETITGTVNDDFDYW

SEQ ID NO: 49472 - protein, 20 aa, Homo sapiens
CARAVSSGYYARHPYYFDYW

SEQ ID NO: 49473 - protein, 20 aa, Homo sapiens
CARDVGCSGGSCYSGVCDYW

SEQ ID NO: 49474 - protein, 27 aa, Homo sapiens
CARDQFTSYPENYYDSSGYYYYGMDVW

SEQ ID NO: 49475 - protein, 11 aa, Homo sapiens
CVTGRREHDYW

SEQ ID NO: 49476 - protein, 13 aa, Homo sapiens
CARPTNYSEFNYW

SEQ ID NO: 49477 - protein, 22 aa, Homo sapiens
CARDQYYYGSGSYYPPHAFDIW

SEQ ID NO: 49478 - protein, 17 aa, Homo sapiens
CARDRDNSGRPRYFHHW

SEQ ID NO: 49479 - protein, 17 aa, Homo sapiens
CARPFYGGNSVAALDYW

SEQ ID NO: 49480 - protein, 17 aa, Homo sapiens
CARETTVYYYYNYMDVW

SEQ ID NO: 49481 - protein, 15 aa, Homo sapiens
CTREDGSYYVHFDYW

SEQ ID NO: 49482 - protein, 24 aa, Homo sapiens
CASTHFDFWSGPPPYYSYYYMDVW

SEQ ID NO: 49483 - protein, 16 aa, Homo sapiens
CARLYPKRPVYYFDYW

SEQ ID NO: 49484 - protein, 16 aa, Homo sapiens
CARRGSGSYYNLSDYW

SEQ ID NO: 49485 - protein, 17 aa, Homo sapiens
CARGGRGYYIGYSFDIW

SEQ ID NO: 49486 - protein, 17 aa, Homo sapiens
CAKCSYDYSGYHFFDYW

SEQ ID NO: 49487 - protein, 18 aa, Homo sapiens
CAREADVVVVPAASLDYW

SEQ ID NO: 49488 - protein, 21 aa, Homo sapiens
CARDPHYTAIPNYYYYYMDVW

SEQ ID NO: 49489 - protein, 14 aa, Homo sapiens
CQVWDTSIDHPGVF

SEQ ID NO: 49490 - protein, 19 aa, Homo sapiens
CAKGLTYYYDSSGYYFDYW

SEQ ID NO: 49491 - protein, 20 aa, Homo sapiens
CARAKITMIVVVRDWYFDLW

SEQ ID NO: 49492 - protein, 15 aa, Homo sapiens
CAREVVTAMGGFDYW

SEQ ID NO: 49493 - protein, 18 aa, Homo sapiens
CAKDHPYCNGGSCYFDSW

SEQ ID NO: 49494 - protein, 20 aa, Homo sapiens
CARDSSGWSNTGAFSAFDIW

SEQ ID NO: 49495 - protein, 18 aa, Homo sapiens
CAKGGYSYGYKSALSDYW

SEQ ID NO: 49496 - protein, 17 aa, Homo sapiens
CARFKYSSSYYYGMDVW

SEQ ID NO: 49497 - protein, 17 aa, Homo sapiens
CVRAPRVFSISPYLDYW

SEQ ID NO: 49498 - protein, 22 aa, Homo sapiens
CARTINYYDSSGYYDDYYFDYW

SEQ ID NO: 49499 - protein, 38 aa, Homo sapiens
CALPILRAEDTAVYYCAKSGGGGYCSGGSCYSGYFDYW

SEQ ID NO: 49500 - protein, 21 aa, Homo sapiens
CARGHYDYVWGSYRHHAFDIW

SEQ ID NO: 49501 - protein, 24 aa, Homo sapiens
CAKDEITMIVVVMVPHYYYYMDVW

SEQ ID NO: 49502 - protein, 20 aa, Homo sapiens
CARGHPSGSYCCPLYHFDYW

SEQ ID NO: 49503 - protein, 25 aa, Homo sapiens
CAREMDSSGYYYFGPPYYYYGMDVW

SEQ ID NO: 49504 - protein, 24 aa, Homo sapiens
CARGDVEEDLTGTQYYYYYYMDVW

SEQ ID NO: 49505 - protein, 25 aa, Homo sapiens
CARDSGDYDFWSGYYRYYYYGMDVW

SEQ ID NO: 49506 - protein, 21 aa, Homo sapiens
CTREVPIRTMIVSSANYFDYW

SEQ ID NO: 49507 - protein, 18 aa, Homo sapiens
CARQPIVIVVHYAPFDYW

SEQ ID NO: 49508 - protein, 23 aa, Homo sapiens
CARDWGIAGILTSRPDSNWFDPW

SEQ ID NO: 49509 - protein, 19 aa, Homo sapiens
CATSIKVAYCNGDCLADYW

SEQ ID NO: 49510 - protein, 14 aa, Homo sapiens
CATRVLLWFGFDYW

SEQ ID NO: 49511 - protein, 20 aa, Homo sapiens
CARHRRGGIVVARPTHFDYW

SEQ ID NO: 49512 - protein, 17 aa, Homo sapiens
CAREGAGSDWYKGVDYW

SEQ ID NO: 49513 - protein, 25 aa, Homo sapiens
CAKDFQTRTFGRNKKTPPFEFFDYW

SEQ ID NO: 49514 - protein, 19 aa, Homo sapiens
CASGGEVYAPNGVEYFQHW

SEQ ID NO: 49515 - protein, 17 aa, Homo sapiens
CARDRVTIFGVAPFDPW

SEQ ID NO: 49516 - protein, 21 aa, Homo sapiens
CARNYYDFWSGYSGAPYFDYW

SEQ ID NO: 49517 - protein, 12 aa, Homo sapiens
CQSYPSSDYWVF

SEQ ID NO: 49518 - protein, 19 aa, Homo sapiens
CAKDQYYDFWSGYRGSDYW

SEQ ID NO: 49519 - protein, 19 aa, Homo sapiens
CTKGRLLDGWNPLDAFDVW

SEQ ID NO: 49520 - protein, 15 aa, Homo sapiens
CARGVGGTDEGFDPW

SEQ ID NO: 49521 - protein, 15 aa, Homo sapiens
CATIAVAGLKLFDYW

SEQ ID NO: 49522 - protein, 24 aa, Homo sapiens
CARDYYGSGSLLRGDYYYYGMDVW

SEQ ID NO: 49523 - protein, 21 aa, Homo sapiens
CAKDIRVARNWNYVGGWFDPW

SEQ ID NO: 49524 - protein, 17 aa, Homo sapiens
CATKIDDSGSYFGFDYW

SEQ ID NO: 49525 - protein, 16 aa, Homo sapiens
CAKAAHGYSYGLADYW

SEQ ID NO: 49526 - protein, 15 aa, Homo sapiens
CAKVQQWLDQGQDYW

SEQ ID NO: 49527 - protein, 23 aa, Homo sapiens
CARVGTEPITIFGVVTVNWFDPW

SEQ ID NO: 49528 - protein, 20 aa, Homo sapiens
CASTRDYYDSSGYIFPFDYW

SEQ ID NO: 49529 - protein, 14 aa, Homo sapiens
CAKALWFGAGLDYW

SEQ ID NO: 49530 - protein, 17 aa, Homo sapiens
CARGTNGVCYTDCEDYW

SEQ ID NO: 49531 - protein, 23 aa, Homo sapiens
CARVPRVTIFGVVIYYYYGMDVW

SEQ ID NO: 49532 - protein, 15 aa, Homo sapiens
CVRDGSSSWNWFDPW

SEQ ID NO: 49533 - protein, 15 aa, Homo sapiens
CAREDYYDEGYYDYW

SEQ ID NO: 49534 - protein, 24 aa, Homo sapiens
CARGSGDTSGYLLSPPYYYGMDVW

SEQ ID NO: 49535 - protein, 18 aa, Homo sapiens
CASNWGGGSYPVEVFDIW

SEQ ID NO: 49536 - protein, 17 aa, Homo sapiens
CAKVIWGSYSPDAFHIW

SEQ ID NO: 49537 - protein, 22 aa, Homo sapiens
CAREIRRITMIVVALYNWFDPW

SEQ ID NO: 49538 - protein, 15 aa, Homo sapiens
CARAKYWQQLVFDRW

SEQ ID NO: 49539 - protein, 18 aa, Homo sapiens
CARASMVDIVVPYYFDYW

SEQ ID NO: 49540 - protein, 19 aa, Homo sapiens
CARDLMIAAAGTGEYFQHW

SEQ ID NO: 49541 - protein, 24 aa, Homo sapiens
CAHQPYYYDSSGYYYDKQDAFDIW

SEQ ID NO: 49542 - protein, 27 aa, Homo sapiens
CASSTSRAYYYGSGSELYYYYYYMDVW

SEQ ID NO: 49543 - protein, 16 aa, Homo sapiens
CGRVEDYSGYERSDYW

SEQ ID NO: 49544 - protein, 13 aa, Homo sapiens
CVRQHYGDPGDYW

SEQ ID NO: 49545 - protein, 22 aa, Homo sapiens
CARDFPAPCSGGSCYSGAFDIW

SEQ ID NO: 49546 - protein, 17 aa, Homo sapiens
CARGGQAVSAVGAFDFW

SEQ ID NO: 49547 - protein, 21 aa, Homo sapiens
CAKGDYYGSGSYRYVSSFDYW

SEQ ID NO: 49548 - protein, 15 aa, Homo sapiens
CARDRLATYYYMDVW

SEQ ID NO: 49549 - protein, 16 aa, Homo sapiens
CAHRLMIVSNNWFDPW

SEQ ID NO: 49550 - protein, 18 aa, Homo sapiens
CAKDQYYYGSGSYPNDYW

SEQ ID NO: 49551 - protein, 21 aa, Homo sapiens
CARAPRLYYDSSGAADYFDYW

SEQ ID NO: 49552 - protein, 17 aa, Homo sapiens
CTKGRIAAPAMDYFDYW

SEQ ID NO: 49553 - protein, 18 aa, Homo sapiens
CARADSSSWIYYYGMDVW

SEQ ID NO: 49554 - protein, 18 aa, Homo sapiens
CARKLGYGRGWYVGFDYW

SEQ ID NO: 49555 - protein, 21 aa, Homo sapiens
CASRQVDTAMGTYYYYYMDVW

SEQ ID NO: 49556 - protein, 17 aa, Homo sapiens
CARDGGIQLWSWGLDYW

SEQ ID NO: 49557 - protein, 16 aa, Homo sapiens
CSRTDLGDGYNIGDYW

SEQ ID NO: 49558 - protein, 12 aa, Homo sapiens
CAFGGGTSFDYW

SEQ ID NO: 49559 - protein, 18 aa, Homo sapiens
CATYMATAMSARWYFDLW

SEQ ID NO: 49560 - protein, 19 aa, Homo sapiens
CARGADVETAIINGWFDTW

SEQ ID NO: 49561 - protein, 22 aa, Homo sapiens
CASHRIVPAAMSIYYYYGMDVW

SEQ ID NO: 49562 - protein, 25 aa, Homo sapiens
CARVAPSVLRYFDWLPLPDHYFDYW

SEQ ID NO: 49563 - protein, 22 aa, Homo sapiens
CTTGMGITIFGVVIILQAFDIW

SEQ ID NO: 49564 - protein, 20 aa, Homo sapiens
CARDGYNHHDSSGYYFFDYW

SEQ ID NO: 49565 - protein, 17 aa, Homo sapiens
CARQGGYSSGWSSVDYW

SEQ ID NO: 49566 - protein, 18 aa, Homo sapiens
CATLRGGYLDGHGDFDLW

SEQ ID NO: 49567 - protein, 15 aa, Homo sapiens
CTSATSAYYFEDDYW

SEQ ID NO: 49568 - protein, 25 aa, Homo sapiens
CARQGWRHCTNGVCYTDYYYGMDVW

SEQ ID NO: 49569 - protein, 13 aa, Homo sapiens
CAREWFGESFDYW

SEQ ID NO: 49570 - protein, 18 aa, Homo sapiens
CARDKAFLSGVGRWFDPW

SEQ ID NO: 49571 - protein, 23 aa, Homo sapiens
CARVASIRYFDWSLITRGYFDLW

SEQ ID NO: 49572 - protein, 14 aa, Homo sapiens
CLQHNNYPRGEFTF

SEQ ID NO: 49573 - protein, 17 aa, Homo sapiens
CARDTVVAGYYWYFDLW

SEQ ID NO: 49574 - protein, 16 aa, Homo sapiens
CARSRSGSYFWYFNLW

SEQ ID NO: 49575 - protein, 17 aa, Homo sapiens
CAKEEHGSGRCGDFDFW

SEQ ID NO: 49576 - protein, 15 aa, Homo sapiens
CARDKVETEDGLDVW

SEQ ID NO: 49577 - protein, 25 aa, Homo sapiens
CAKAPGGTIFGVVIITDYYYYMDVW

SEQ ID NO: 49578 - protein, 20 aa, Homo sapiens
CARLRPPGAVAGTAVSLDYW

SEQ ID NO: 49579 - protein, 20 aa, Homo sapiens
CAKRAWGYSYGQPDYYFDYW

SEQ ID NO: 49580 - protein, 20 aa, Homo sapiens
CARHFRRWLQPHGGYYFDYW

SEQ ID NO: 49581 - protein, 23 aa, Homo sapiens
CAHSPTHYFDSSGIYHPGAFDFW

SEQ ID NO: 49582 - protein, 16 aa, Homo sapiens
CARGDIYGDSDVFEIW

SEQ ID NO: 49583 - protein, 18 aa, Homo sapiens
CASLNCTGGVWYNWFDPW

SEQ ID NO: 49584 - protein, 16 aa, Homo sapiens
CARARSGNYYGDFDYW

SEQ ID NO: 49585 - protein, 22 aa, Homo sapiens
CARAPAPIQLWLRIGYNWFDPW

SEQ ID NO: 49586 - protein, 15 aa, Homo sapiens
CAKVEAAGTGGLDYW

SEQ ID NO: 49587 - protein, 23 aa, Homo sapiens
CARDHGLRFLEWLRGLNYYFDYW

SEQ ID NO: 49588 - protein, 13 aa, Homo sapiens
CQQLNSFPSLFSF

SEQ ID NO: 49589 - protein, 23 aa, Homo sapiens
CAKVPAPYCGSSTSCYSLEVDYW

SEQ ID NO: 49590 - protein, 17 aa, Homo sapiens
CTRHPWTGLYYYGMDVW

SEQ ID NO: 49591 - protein, 22 aa, Homo sapiens
CARDPFYIVATILADTDGMDVW

SEQ ID NO: 49592 - protein, 20 aa, Homo sapiens
CARSFYDSSSRSTIETFDFW

SEQ ID NO: 49593 - protein, 19 aa, Homo sapiens
CARAGRITIFGVVSWFDPW

SEQ ID NO: 49594 - protein, 23 aa, Homo sapiens
CAREPNNWNSLASNYYYYAMDVW

SEQ ID NO: 49595 - protein, 14 aa, Homo sapiens
CARGFRQYSVFDYW

SEQ ID NO: 49596 - protein, 23 aa, Homo sapiens
CAADFWSGYYSPDWDYYYGMDVW

SEQ ID NO: 49597 - protein, 23 aa, Homo sapiens
CARHWGWDIVLVVYAAPYWFDPW

SEQ ID NO: 49598 - protein, 14 aa, Homo sapiens
CARGMILPGEVDYW

SEQ ID NO: 49599 - protein, 13 aa, Homo sapiens
CARHTGWPAFDYW

SEQ ID NO: 49600 - protein, 15 aa, Homo sapiens
CAGRSRTSGTWLDPW

SEQ ID NO: 49601 - protein, 14 aa, Homo sapiens
CARATYRNGWCDYW

SEQ ID NO: 49602 - protein, 19 aa, Homo sapiens
CARVPLVWIAAAGYYFDYW

SEQ ID NO: 49603 - protein, 19 aa, Homo sapiens
CARDWGTYYYDSRREFGYW

SEQ ID NO: 49604 - protein, 16 aa, Homo sapiens
CARAHSSGYYYPFDYW

SEQ ID NO: 49605 - protein, 15 aa, Homo sapiens
CAIIRSAYYAPFDYW

SEQ ID NO: 49606 - protein, 16 aa, Homo sapiens
CAGVVPAAIPTGFDPW

SEQ ID NO: 49607 - protein, 25 aa, Homo sapiens
CARDLPALGYYYGSGKPETEGFDPW

SEQ ID NO: 49608 - protein, 20 aa, Homo sapiens
CARPTGIVVVPAADNWFDPW

SEQ ID NO: 49609 - protein, 17 aa, Homo sapiens
CARLPGGMTTVTTGDYW

SEQ ID NO: 49610 - protein, 17 aa, Homo sapiens
CASYIGSGWTPVYFDYW

SEQ ID NO: 49611 - protein, 14 aa, Homo sapiens
CARTYDSSAPFDYW

SEQ ID NO: 49612 - protein, 18 aa, Homo sapiens
CASSGYYPRNWADAFDIW

SEQ ID NO: 49613 - protein, 23 aa, Homo sapiens
CARAPTYYDILTGYSVRTYFDYW

SEQ ID NO: 49614 - protein, 14 aa, Homo sapiens
CAKFSLQQLGNDYW

SEQ ID NO: 49615 - protein, 29 aa, Homo sapiens
CAKDAQYYDFWSGYFGTPHYYYYYYMDVW

SEQ ID NO: 49616 - protein, 23 aa, Homo sapiens
CARHRSFGDDYGDQTGRYYFDYW

SEQ ID NO: 49617 - protein, 16 aa, Homo sapiens
CAKVSTVVTPGPFDYW

SEQ ID NO: 49618 - protein, 17 aa, Homo sapiens
CARTYFALIWPRGFDYW

SEQ ID NO: 49619 - protein, 15 aa, Homo sapiens
CARDPGDVYWYFDLW

SEQ ID NO: 49620 - protein, 26 aa, Homo sapiens
CARGPEGFLEWSHWPPGGGYYYMDVW

SEQ ID NO: 49621 - protein, 16 aa, Homo sapiens
CVREREAGIYNWFDPW

SEQ ID NO: 49622 - protein, 19 aa, Homo sapiens
CVWASVVPPYYLYYYMDVW

SEQ ID NO: 49623 - protein, 20 aa, Homo sapiens
CARDLQVSRRPSYYYYMDVW

SEQ ID NO: 49624 - protein, 20 aa, Homo sapiens
CAKTVAHTWGQYGVDYFDMW

SEQ ID NO: 49625 - protein, 15 aa, Homo sapiens
CAQVNIAAAVSFDYW

SEQ ID NO: 49626 - protein, 20 aa, Homo sapiens
CARQEISSWQYYYYYYMDVW

SEQ ID NO: 49627 - protein, 17 aa, Homo sapiens
CARDGKMRVSRYYFDYW

SEQ ID NO: 49628 - protein, 13 aa, Homo sapiens
CASLFGEDDFDYW

SEQ ID NO: 49629 - protein, 16 aa, Homo sapiens
CAHIKYRLRRGAFDIW

SEQ ID NO: 49630 - protein, 23 aa, Homo sapiens
CARDARGYYDSSGYYYLEPFDYW

SEQ ID NO: 49631 - protein, 22 aa, Homo sapiens
CARDTLTTIFGVPIWGGWFDPW

SEQ ID NO: 49632 - protein, 24 aa, Homo sapiens
CARAASRITIFGVVITTPYYFDYW

SEQ ID NO: 49633 - protein, 15 aa, Homo sapiens
CARAQLGASDGLDIW

SEQ ID NO: 49634 - protein, 17 aa, Homo sapiens
CADIPYYYDSSGYQGYW

SEQ ID NO: 49635 - protein, 20 aa, Homo sapiens
CAKDINYDIFTGYDNYFDYW

SEQ ID NO: 49636 - protein, 19 aa, Homo sapiens
CATAYSSSLLPYYYGMDVW

SEQ ID NO: 49637 - protein, 15 aa, Homo sapiens
CAKSIGGSSVAVDYW

SEQ ID NO: 49638 - protein, 19 aa, Homo sapiens
CARLVLPNSSQGGNYFDTW

SEQ ID NO: 49639 - protein, 32 aa, Homo sapiens
CARDREEDSSGVNDYDFWSGYYKDYYYGMDVW

SEQ ID NO: 49640 - protein, 18 aa, Homo sapiens
CASSVTGYDSSGYYPGYW

SEQ ID NO: 49641 - protein, 22 aa, Homo sapiens
CARLTYYYDSIGFYPSHYFDFW

SEQ ID NO: 49642 - protein, 15 aa, Homo sapiens
CTTGIAAAGLQIDYW

SEQ ID NO: 49643 - protein, 16 aa, Homo sapiens
CATGPGIAVTSWFDPW

SEQ ID NO: 49644 - protein, 19 aa, Homo sapiens
CARDGFNSESKDHDGFDVW

SEQ ID NO: 49645 - protein, 17 aa, Homo sapiens
CARGDSGDSSGYYFDYW

SEQ ID NO: 49646 - protein, 21 aa, Homo sapiens
CARDRPEYYDFWSGYWYFDLW

SEQ ID NO: 49647 - protein, 17 aa, Homo sapiens
CARQSASDHGDYLFDNW

SEQ ID NO: 49648 - protein, 21 aa, Homo sapiens
CVRVDMTTIPKLGQPWYFDLW

SEQ ID NO: 49649 - protein, 18 aa, Homo sapiens
CARVGRQYSSGRLVFDYW

SEQ ID NO: 49650 - protein, 13 aa, Homo sapiens
CQSADGSVTIGVF

SEQ ID NO: 49651 - protein, 17 aa, Homo sapiens
CAKIVEMATIWGTFDIW

SEQ ID NO: 49652 - protein, 16 aa, Homo sapiens
CARVRRSQFSAPLDYW

SEQ ID NO: 49653 - protein, 18 aa, Homo sapiens
CAKDRLGGDWISVSFDMW

SEQ ID NO: 49654 - protein, 24 aa, Homo sapiens
CARGDVLRFLEWSKPYYYYYMDVW

SEQ ID NO: 49655 - protein, 14 aa, Homo sapiens
CASLLADRAGFDNW

SEQ ID NO: 49656 - protein, 19 aa, Homo sapiens
CAKDHVRGYYGSGSYWYYW

SEQ ID NO: 49657 - protein, 16 aa, Homo sapiens
CAREGAVRPVNWFDPW

SEQ ID NO: 49658 - protein, 22 aa, Homo sapiens
CARGKSVTIFGVVIFQGPVDYW

SEQ ID NO: 49659 - protein, 23 aa, Homo sapiens
CAREKGDIVVVVAATGYDAFDIW

SEQ ID NO: 49660 - protein, 14 aa, Homo sapiens
CAGWFGGNYYMDVW

SEQ ID NO: 49661 - protein, 23 aa, Homo sapiens
CARVGYFLAHDYGENVSGAFDIW

SEQ ID NO: 49662 - protein, 26 aa, Homo sapiens
CTRVVYVRGITIFGVVSEVLSDLDYW

SEQ ID NO: 49663 - protein, 15 aa, Homo sapiens
CARDTVEGVTPLDYW

SEQ ID NO: 49664 - protein, 19 aa, Homo sapiens
CAKDKACRGGSCGTPFDHW

SEQ ID NO: 49665 - protein, 29 aa, Homo sapiens
CARDLFVVVPAADATTHGKIYYYYGMDVW

SEQ ID NO: 49666 - protein, 17 aa, Homo sapiens
CARGWRLVTFSPYFDSW

SEQ ID NO: 49667 - protein, 20 aa, Homo sapiens
CARSYYGSGSYYNGESFAYW

SEQ ID NO: 49668 - protein, 21 aa, Homo sapiens
CARGGYGSGSYYIRYNWFDPW

SEQ ID NO: 49669 - protein, 16 aa, Homo sapiens
CAHSGRFTSRWSFDYW

SEQ ID NO: 49670 - protein, 18 aa, Homo sapiens
CARGMGGTTLDPYYFDYW

SEQ ID NO: 49671 - protein, 22 aa, Homo sapiens
CARAAHYYDSSGRERDDAFDIW

SEQ ID NO: 49672 - protein, 23 aa, Homo sapiens
CARDAPAEYYYDSSGYTDYFDYW

SEQ ID NO: 49673 - protein, 16 aa, Homo sapiens
CAHRVTVVTSQYFQHW

SEQ ID NO: 49674 - protein, 26 aa, Homo sapiens
CARDLDYYGSGSASETYYYYYGMDVW

SEQ ID NO: 49675 - protein, 24 aa, Homo sapiens
CARDHCTNGVCYLQYYYYYGMDVW

SEQ ID NO: 49676 - protein, 15 aa, Homo sapiens
CTIRTVVTTGPFDYW

SEQ ID NO: 49677 - protein, 18 aa, Homo sapiens
CASWDDRLSGDSLSGPVF

SEQ ID NO: 49678 - protein, 24 aa, Homo sapiens
CARSYCSGGSTKSPYYYYYGMDVW

SEQ ID NO: 49679 - protein, 15 aa, Homo sapiens
CTNLDTLGRGALDIW

SEQ ID NO: 49680 - protein, 18 aa, Homo sapiens
CAKDYSSGWRMGLYFDYW

SEQ ID NO: 49681 - protein, 15 aa, Homo sapiens
CAADDASGSYVFGYW

SEQ ID NO: 49682 - protein, 18 aa, Homo sapiens
CASCIAVAGSGHDAFDIW

SEQ ID NO: 49683 - protein, 17 aa, Homo sapiens
CARHPPGWNLRYYLDFW

SEQ ID NO: 49684 - protein, 18 aa, Homo sapiens
CAREGCTGGVCYYYFDYW

SEQ ID NO: 49685 - protein, 24 aa, Homo sapiens
CARDKWRTDCSGGSCYFWDGMDVW

SEQ ID NO: 49686 - protein, 20 aa, Homo sapiens
CARTVGDTAMVTGIYYFDYW

SEQ ID NO: 49687 - protein, 15 aa, Homo sapiens
CAKSSGWARHIFDYW

SEQ ID NO: 49688 - protein, 20 aa, Homo sapiens
CAARYCTGGTCSVSDSLDIW

SEQ ID NO: 49689 - protein, 19 aa, Homo sapiens
CTYDGWLAPYYYYYGMDVW

SEQ ID NO: 49690 - protein, 18 aa, Homo sapiens
CATGLLTSQYYYYYMDVW

SEQ ID NO: 49691 - protein, 18 aa, Homo sapiens
CARDKGWLGVYYYYMDVW

SEQ ID NO: 49692 - protein, 16 aa, Homo sapiens
CAKDPSENGNYFFDLW

SEQ ID NO: 49693 - protein, 20 aa, Homo sapiens
CAKESPWAPSLYYYYGMDVW

SEQ ID NO: 49694 - protein, 22 aa, Homo sapiens
CARDQGWESGRDDSGPYYFDYW

SEQ ID NO: 49695 - protein, 17 aa, Homo sapiens
CAKCGWRPTPDWYFDLW

SEQ ID NO: 49696 - protein, 20 aa, Homo sapiens
CARVVNWGHGYNSNYYFDYW

SEQ ID NO: 49697 - protein, 16 aa, Homo sapiens
CAHISGDFGDYVFDSW

SEQ ID NO: 49698 - protein, 19 aa, Homo sapiens
CAKGGVGSGTFYRAAFDVW

SEQ ID NO: 49699 - protein, 24 aa, Homo sapiens
CARDAVVVVAATHPAAPRGVFDYW

SEQ ID NO: 49700 - protein, 18 aa, Homo sapiens
CARGDSSAWYVRGYFDYW

SEQ ID NO: 49701 - protein, 16 aa, Homo sapiens
CARGKAGSGVWFLDYW

SEQ ID NO: 49702 - protein, 26 aa, Homo sapiens
CARGPITMVRGVIIQTYYYYYGMDVW

SEQ ID NO: 49703 - protein, 14 aa, Homo sapiens
CARTFDTAMPFDYW

SEQ ID NO: 49704 - protein, 17 aa, Homo sapiens
CAKNWNYGLGYHAFDIW

SEQ ID NO: 49705 - protein, 19 aa, Homo sapiens
CAKADGEQQLVRGYYFDYW

SEQ ID NO: 49706 - protein, 23 aa, Homo sapiens
CARGFVDTAMVTAYYYYYYMDVW

SEQ ID NO: 49707 - protein, 13 aa, Homo sapiens
CAKRYYYYYMDVW

SEQ ID NO: 49708 - protein, 23 aa, Homo sapiens
CARERFYYERSGYSRGYNWFDPW

SEQ ID NO: 49709 - protein, 16 aa, Homo sapiens
CARGAVTTYPNWFDSW

SEQ ID NO: 49710 - protein, 22 aa, Homo sapiens
CARESWRITIFGVPKRDGMDVW

SEQ ID NO: 49711 - protein, 20 aa, Homo sapiens
CARARDRGYFSRSHYYMDVW

SEQ ID NO: 49712 - protein, 16 aa, Homo sapiens
CARDLRVENSNPIDPW

SEQ ID NO: 49713 - protein, 14 aa, Homo sapiens
CAPRSLAVPNFDYW

SEQ ID NO: 49714 - protein, 14 aa, Homo sapiens
CARDLGGMVNLDYW

SEQ ID NO: 49715 - protein, 20 aa, Homo sapiens
CARLSGWMRWLRGWDSFDFW

SEQ ID NO: 49716 - protein, 19 aa, Homo sapiens
CARRLNQWLDLRGAAFDIW

SEQ ID NO: 49717 - protein, 17 aa, Homo sapiens
CAKDESSGYIPRGGDYW

SEQ ID NO: 49718 - protein, 26 aa, Homo sapiens
CATLGAGIVVVPAAILDYYYYGMDVW

SEQ ID NO: 49719 - protein, 16 aa, Homo sapiens
CARERWQQLGYNFDYW

SEQ ID NO: 49720 - protein, 19 aa, Homo sapiens
CARGTYSSGRGLGVYFDYW

SEQ ID NO: 49721 - protein, 24 aa, Homo sapiens
CARGKCSSSSCYSHVFYYYGMDVW

SEQ ID NO: 49722 - protein, 18 aa, Homo sapiens
CARAPITMIVVVNAFDIW

SEQ ID NO: 49723 - protein, 17 aa, Homo sapiens
CARSYLGYSAHDYFDYW

SEQ ID NO: 49724 - protein, 21 aa, Homo sapiens
CARGGPPSSYSSSYLNWFDPW

SEQ ID NO: 49725 - protein, 28 aa, Homo sapiens
CAREGRRITIFGVEANPPPYYYYGMDVW

SEQ ID NO: 49726 - protein, 23 aa, Homo sapiens
CARVGSGYYDILTGFPPDAFDIW

SEQ ID NO: 49727 - protein, 22 aa, Homo sapiens
CARETTPRHYYDSSGDDAFDIW

SEQ ID NO: 49728 - protein, 22 aa, Homo sapiens
CTTDRVYDYVWGSYRYDAFDIW

SEQ ID NO: 49729 - protein, 18 aa, Homo sapiens
CARESVDFWSGQGYFDLW

SEQ ID NO: 49730 - protein, 15 aa, Homo sapiens
CARGVWVRGYNLDYW

SEQ ID NO: 49731 - protein, 21 aa, Homo sapiens
CARADLHYDFWSGYPNWFDPW

SEQ ID NO: 49732 - protein, 22 aa, Homo sapiens
CARADSITIFGVAIEGSWFDPW

SEQ ID NO: 49733 - protein, 19 aa, Homo sapiens
CTTGYGSGWEFYYYYMDVW

SEQ ID NO: 49734 - protein, 21 aa, Homo sapiens
CARDYRVVGSNDYGDGHFDYW

SEQ ID NO: 49735 - protein, 21 aa, Homo sapiens
CARGRLLLWFGELLYEPFDYW

SEQ ID NO: 49736 - protein, 19 aa, Homo sapiens
CARDRNGGKVVVVAAADYW

SEQ ID NO: 49737 - protein, 20 aa, Homo sapiens
CARASSTSCYRFGSCAFDIW

SEQ ID NO: 49738 - protein, 19 aa, Homo sapiens
CAKDGSTNYAPYSGYFDYW

SEQ ID NO: 49739 - protein, 20 aa, Homo sapiens
CARLGDYGDILYYYYGMDVW

SEQ ID NO: 49740 - protein, 26 aa, Homo sapiens
CAREGVGYYDSSGYSTYYYYYGMDVW

SEQ ID NO: 49741 - protein, 16 aa, Homo sapiens
CANDVGGYSYGHTDYW

SEQ ID NO: 49742 - protein, 22 aa, Homo sapiens
CAKAHGLYCSGGSCYQNYFDYW

SEQ ID NO: 49743 - protein, 24 aa, Homo sapiens
CARGGPQFGALRFLEWFPTAFDIW

SEQ ID NO: 49744 - protein, 18 aa, Homo sapiens
CARPMATMWGREYYFDYW

SEQ ID NO: 49745 - protein, 18 aa, Homo sapiens
CASRYSQARYYYYGMDVW

SEQ ID NO: 49746 - protein, 24 aa, Homo sapiens
CARDLLSYDFWSGSPRPYNWFDPW

SEQ ID NO: 49747 - protein, 23 aa, Homo sapiens
CGSVSIAGEMAAIFDFFYYRDIW

SEQ ID NO: 49748 - protein, 15 aa, Homo sapiens
CAKDIGRDGTLFDLW

SEQ ID NO: 49749 - protein, 25 aa, Homo sapiens
CAREGRSYYDSSGYYYPTNDAFDIW

SEQ ID NO: 49750 - protein, 17 aa, Homo sapiens
CATLPYSTSSSHYFDYW

SEQ ID NO: 49751 - protein, 21 aa, Homo sapiens
CARDSGAPSTSSSWYGGFDYW

SEQ ID NO: 49752 - protein, 27 aa, Homo sapiens
CARGHGYYYGSGSYSLLNYYYYYMDVW

SEQ ID NO: 49753 - protein, 19 aa, Homo sapiens
CARVGIVATIYHFNWFDPW

SEQ ID NO: 49754 - protein, 22 aa, Homo sapiens
CARGMVSSSWYTPLYYYYMDVW

SEQ ID NO: 49755 - protein, 19 aa, Homo sapiens
CARGSYSHSSAYAVAFDIW

SEQ ID NO: 49756 - protein, 15 aa, Homo sapiens
CARDMVALHEPDDYW

SEQ ID NO: 49757 - protein, 18 aa, Homo sapiens
CAKDTGGDYGDYYGMDVW

SEQ ID NO: 49758 - protein, 16 aa, Homo sapiens
CTSDKEGAYGPTFDYW

SEQ ID NO: 49759 - protein, 17 aa, Homo sapiens
CAHLSPDSSAYYKFDSW

SEQ ID NO: 49760 - protein, 22 aa, Homo sapiens
CAKVETLLRYFDWLSEDAFDIW

SEQ ID NO: 49761 - protein, 16 aa, Homo sapiens
CAHRHLIAAASAFDYW

SEQ ID NO: 49762 - protein, 23 aa, Homo sapiens
CARALGYCGGDCYYSPPYYFDYW

SEQ ID NO: 49763 - protein, 18 aa, Homo sapiens
CARDRRLLWFGEDGMDVW

SEQ ID NO: 49764 - protein, 16 aa, Homo sapiens
CARQPGDTIAPPGDYW

SEQ ID NO: 49765 - protein, 16 aa, Homo sapiens
CTTRYCSGGGCYPDYW

SEQ ID NO: 49766 - protein, 22 aa, Homo sapiens
CARSLIAVTDETTYFFYYMDVW

SEQ ID NO: 49767 - protein, 22 aa, Homo sapiens
CAKSRSETMLREVSLNDAFDMW

SEQ ID NO: 49768 - protein, 20 aa, Homo sapiens
CARANCGSDCYSRRYYFDYW

SEQ ID NO: 49769 - protein, 11 aa, Homo sapiens
CSYAGSITFGF

SEQ ID NO: 49770 - protein, 22 aa, Homo sapiens
CAREAPYTVTTNYYYYYGMDVW

SEQ ID NO: 49771 - protein, 21 aa, Homo sapiens
CARDYRWLQLPYYYYYGMDVW

SEQ ID NO: 49772 - protein, 21 aa, Homo sapiens
CAKDPSGLKLPYYYFYYMDVW

SEQ ID NO: 49773 - protein, 18 aa, Homo sapiens
CAKDVGRAYSRGSRFDYW

SEQ ID NO: 49774 - protein, 22 aa, Homo sapiens
CARLPVVPAAIRLYYYYGMDVW

SEQ ID NO: 49775 - protein, 21 aa, Homo sapiens
CARAGREFWSGYWMEHYFDYW

SEQ ID NO: 49776 - protein, 16 aa, Homo sapiens
CVKDSWTWGERYLDLW

SEQ ID NO: 49777 - protein, 18 aa, Homo sapiens
CVHRGSSRWFNDDAFDIW

SEQ ID NO: 49778 - protein, 23 aa, Homo sapiens
CAKDENRITGTTQLKLYNWFDPW

SEQ ID NO: 49779 - protein, 25 aa, Homo sapiens
CARHHPVYSGYDYWGSLADYYFDYW

SEQ ID NO: 49780 - protein, 13 aa, Homo sapiens
CVRNDPDNWFDPW

SEQ ID NO: 49781 - protein, 21 aa, Homo sapiens
CARDLTQIVVVITPAYYFDYW

SEQ ID NO: 49782 - protein, 22 aa, Homo sapiens
CARDALRVGTMVRGGGYYFDYW

SEQ ID NO: 49783 - protein, 24 aa, Homo sapiens
CAKEGSPYYDILTGYYSRAAIDYW

SEQ ID NO: 49784 - protein, 12 aa, Homo sapiens
CANFHTFGFDYW

SEQ ID NO: 49785 - protein, 14 aa, Homo sapiens
CARLTQGLAHNDYW

SEQ ID NO: 49786 - protein, 19 aa, Homo sapiens
CARSTYDILTGYSDTFDIW

SEQ ID NO: 49787 - protein, 17 aa, Homo sapiens
CARSSVYCGGDCYPDYW

SEQ ID NO: 49788 - protein, 18 aa, Homo sapiens
CARAGLTIFGVVTNFDYW

SEQ ID NO: 49789 - protein, 15 aa, Homo sapiens
CAKGCGGDCHYFDSW

SEQ ID NO: 49790 - protein, 16 aa, Homo sapiens
CARGQKYYAQGDVDYW

SEQ ID NO: 49791 - protein, 19 aa, Homo sapiens
CASQDSSGYYMAGWYFDLW

SEQ ID NO: 49792 - protein, 22 aa, Homo sapiens
CARDVRIAVTSTQYYYYGMDVW

SEQ ID NO: 49793 - protein, 19 aa, Homo sapiens
CARSAGSGWYSLLFYFDYW

SEQ ID NO: 49794 - protein, 17 aa, Homo sapiens
CAYLIIAAPTVDAFDIW

SEQ ID NO: 49795 - protein, 21 aa, Homo sapiens
CARLGYYDSSGYYYVSVGDYW

SEQ ID NO: 49796 - protein, 19 aa, Homo sapiens
CATESYDSSGTHAAGGDYW

SEQ ID NO: 49797 - protein, 19 aa, Homo sapiens
CARARVGIATAADYYMDVW

SEQ ID NO: 49798 - protein, 20 aa, Homo sapiens
CANQELERRLYYYYYGMDVW

SEQ ID NO: 49799 - protein, 24 aa, Homo sapiens
CARDYPDYYDFWSGYYNGRGFDPW

SEQ ID NO: 49800 - protein, 21 aa, Homo sapiens
CARGPDGGDYYGSGSGAFDIW

SEQ ID NO: 49801 - protein, 20 aa, Homo sapiens
CARGLRPSFWNGLRPPFDPW

SEQ ID NO: 49802 - protein, 18 aa, Homo sapiens
CARIADNWNYEVDYFDYW

SEQ ID NO: 49803 - protein, 30 aa, Homo sapiens
CARDSFEPYYYGSGSHGLKKAYYYYGMDVW

SEQ ID NO: 49804 - protein, 25 aa, Homo sapiens
CAKDGALLWFGELSPRYYYYGMDVW

SEQ ID NO: 49805 - protein, 19 aa, Homo sapiens
CARTYYDILTGYYSLFDYW

SEQ ID NO: 49806 - protein, 18 aa, Homo sapiens
CASQGTSGSYYRDAFDIW

SEQ ID NO: 49807 - protein, 19 aa, Homo sapiens
CARGRPGDNADYYYGMDVW

SEQ ID NO: 49808 - protein, 29 aa, Homo sapiens
CARDGSPPYYGSGSPLSPRYYYYYYMDVW

SEQ ID NO: 49809 - protein, 18 aa, Homo sapiens
CARDPGEEWELSSHFDSW

SEQ ID NO: 49810 - protein, 22 aa, Homo sapiens
CARGHYYDSSGYRDYYYGMDVW

SEQ ID NO: 49811 - protein, 16 aa, Homo sapiens
CARAMVRGVITYFDYW

SEQ ID NO: 49812 - protein, 24 aa, Homo sapiens
CARDGGITGTYGWIYYYYYYMDVW

SEQ ID NO: 49813 - protein, 14 aa, Homo sapiens
CAREHGGGSYPDYW

SEQ ID NO: 49814 - protein, 21 aa, Homo sapiens
CASSKWQDCSGGSCYGGLDYW

SEQ ID NO: 49815 - protein, 19 aa, Homo sapiens
CAKDVMGALWGPWSYFDYW

SEQ ID NO: 49816 - protein, 15 aa, Homo sapiens
CARSYFVDPGYFDYW

SEQ ID NO: 49817 - protein, 22 aa, Homo sapiens
CARDPTVTQPSHYYYYYGMDVW

SEQ ID NO: 49818 - protein, 18 aa, Homo sapiens
CAQLGCAGDCYYNWFHPW

SEQ ID NO: 49819 - protein, 26 aa, Homo sapiens
CAKDRKKVPSIAMIVVVTTTDAFDIW

SEQ ID NO: 49820 - protein, 20 aa, Homo sapiens
CTTEEITIFPYYYYYGMDVW

SEQ ID NO: 49821 - protein, 19 aa, Homo sapiens
CAKEGGVDVTQGRINFEYW

SEQ ID NO: 49822 - protein, 19 aa, Homo sapiens
CARDWGGSDRMPTGIFDLW

SEQ ID NO: 49823 - protein, 19 aa, Homo sapiens
CARDSRPDYGGNSDGLDYW

SEQ ID NO: 49824 - protein, 22 aa, Homo sapiens
CARSAARNYYDSSGYPEWFDPW

SEQ ID NO: 49825 - protein, 19 aa, Homo sapiens
CATEGKCTGGVCDDGFDIW

SEQ ID NO: 49826 - protein, 15 aa, Homo sapiens
CAKDEGGSYYEYDYW

SEQ ID NO: 49827 - protein, 20 aa, Homo sapiens
CARSLNEPLAFGSSWYFDYW

SEQ ID NO: 49828 - protein, 21 aa, Homo sapiens
CVRDLISYSATYYRAYYFDYW

SEQ ID NO: 49829 - protein, 16 aa, Homo sapiens
CAKVYGDYARGAFDIW

SEQ ID NO: 49830 - protein, 25 aa, Homo sapiens
CARDRNADLEWLFGGRYYYYGMDVW

SEQ ID NO: 49831 - protein, 20 aa, Homo sapiens
CTTEGNVLRFLEWLQDFDYW

SEQ ID NO: 49832 - protein, 23 aa, Homo sapiens
CARGSVYYDSSGYKFPVRYFDYW

SEQ ID NO: 49833 - protein, 18 aa, Homo sapiens
CARDAGIAAADNWYFDLW

SEQ ID NO: 49834 - protein, 17 aa, Homo sapiens
CARLDSSGPIGGWFDPW

SEQ ID NO: 49835 - protein, 16 aa, Homo sapiens
CAKDINPNTGRGFDYW

SEQ ID NO: 49836 - protein, 21 aa, Homo sapiens
CQQSYITPRTFGQGTKVERPF

SEQ ID NO: 49837 - protein, 25 aa, Homo sapiens
CARVASQWDIVLVVYARPYWYFDLW

SEQ ID NO: 49838 - protein, 15 aa, Homo sapiens
CARGIGELDDAFDIW

SEQ ID NO: 49839 - protein, 22 aa, Homo sapiens
CARAPIVVVPAATEGLDAFDIW

SEQ ID NO: 49840 - protein, 17 aa, Homo sapiens
CVKDMAGTGTHDAFDLW

SEQ ID NO: 49841 - protein, 17 aa, Homo sapiens
CARDSAGTRWLDAFDIW

SEQ ID NO: 49842 - protein, 12 aa, Homo sapiens
CYSADTSGIYVF

SEQ ID NO: 49843 - protein, 19 aa, Homo sapiens
CAKDQRGYYSYYYYYMDVW

SEQ ID NO: 49844 - protein, 14 aa, Homo sapiens
CTVEYSSSWYAFYW

SEQ ID NO: 49845 - protein, 18 aa, Homo sapiens
CARAGRYSYGGYVYFDLW

SEQ ID NO: 49846 - protein, 20 aa, Homo sapiens
CARLSGQFLGSPTSSYFDYW

SEQ ID NO: 49847 - protein, 22 aa, Homo sapiens
CARRFGFGSTNFFKHQAWFDPW

SEQ ID NO: 49848 - protein, 20 aa, Homo sapiens
CARIPKTYSNYDYYYYMDVW

SEQ ID NO: 49849 - protein, 18 aa, Homo sapiens
CARGPGSGPSDQEGHDYW

SEQ ID NO: 49850 - protein, 14 aa, Homo sapiens
CASRVAVPGAFDYW

SEQ ID NO: 49851 - protein, 20 aa, Homo sapiens
CARALTRYYDILTGSGGDYW

SEQ ID NO: 49852 - protein, 22 aa, Homo sapiens
CAKAPTGWEVYGDYLQSWFDPW

SEQ ID NO: 49853 - protein, 21 aa, Homo sapiens
CARGIYYDSSGYYFEDAFDIW

SEQ ID NO: 49854 - protein, 26 aa, Homo sapiens
CAKLPTLQRGYSGYDASMMGDAFDIW

SEQ ID NO: 49855 - protein, 17 aa, Homo sapiens
CARDYRFGETPEYFQHW

SEQ ID NO: 49856 - protein, 20 aa, Homo sapiens
CAKDGGIQLWLLDYWYFDLW

SEQ ID NO: 49857 - protein, 23 aa, Homo sapiens
CARQIPRDNDYWSGYHTGYFDSW

SEQ ID NO: 49858 - protein, 15 aa, Homo sapiens
CAKRHSSGWYYFEYW

SEQ ID NO: 49859 - protein, 26 aa, Homo sapiens
CARDPNLGPYYYDSSGYYYTRYFDYW

SEQ ID NO: 49860 - protein, 11 aa, Homo sapiens
CTRDDGSGDYW

SEQ ID NO: 49861 - protein, 15 aa, Homo sapiens
CTRLYEAVAIPFDYW

SEQ ID NO: 49862 - protein, 22 aa, Homo sapiens
CARDPEVRYFDWSYYYYGMDVW

SEQ ID NO: 49863 - protein, 24 aa, Homo sapiens
CARGRPDHRIVLVVYERGNYFDYW

SEQ ID NO: 49864 - protein, 19 aa, Homo sapiens
CARGPGVWSGYYGYYFDYW

SEQ ID NO: 49865 - protein, 19 aa, Homo sapiens
CARAVTGPVAGTGNWFDSW

SEQ ID NO: 49866 - protein, 17 aa, Homo sapiens
CARGNGVPVTTYYFDYW

SEQ ID NO: 49867 - protein, 21 aa, Homo sapiens
CATPVDSYYYDSSGYLGFDYW

SEQ ID NO: 49868 - protein, 14 aa, Homo sapiens
CARDLITHLWSDYW

SEQ ID NO: 49869 - protein, 16 aa, Homo sapiens
CTTRYVWGSYRYNDYW

SEQ ID NO: 49870 - protein, 18 aa, Homo sapiens
CVHPAAGFDSAWIPFDYW

SEQ ID NO: 49871 - protein, 18 aa, Homo sapiens
CARRGVGAIQRMSAFDIW

SEQ ID NO: 49872 - protein, 23 aa, Homo sapiens
CAKETPEDIVVVVAATPLSFDYW

SEQ ID NO: 49873 - protein, 20 aa, Homo sapiens
CARSFCTGGVCLAAHAFDIW

SEQ ID NO: 49874 - protein, 23 aa, Homo sapiens
CARVIHIAAAGTKYYYYYYMDVW

SEQ ID NO: 49875 - protein, 16 aa, Homo sapiens
CASLLYTAMRASPDYW

SEQ ID NO: 49876 - protein, 20 aa, Homo sapiens
CAGQPTGYCSSTSCNWFDPW

SEQ ID NO: 49877 - protein, 17 aa, Homo sapiens
CARALSIAAAGSPIDYW

SEQ ID NO: 49878 - protein, 14 aa, Homo sapiens
CARDYSNQFYFDNW

SEQ ID NO: 49879 - protein, 13 aa, Homo sapiens
CARRNLWGQSDYW

SEQ ID NO: 49880 - protein, 21 aa, Homo sapiens
CARGRTIVVGRRSMLDSFDFW

SEQ ID NO: 49881 - protein, 20 aa, Homo sapiens
CARVSARYSSGWYFTSIDYW

SEQ ID NO: 49882 - protein, 15 aa, Homo sapiens
CAREIAEAGNVVDSW

SEQ ID NO: 49883 - protein, 16 aa, Homo sapiens
CAKDIAVAGTGSIDYW

SEQ ID NO: 49884 - protein, 18 aa, Homo sapiens
CARAPCAVDTAMVCDDYW

SEQ ID NO: 49885 - protein, 15 aa, Homo sapiens
CARRRLAAAGGYDYW

SEQ ID NO: 49886 - protein, 19 aa, Homo sapiens
CASRHIVVVTAHIGEYDYW

SEQ ID NO: 49887 - protein, 20 aa, Homo sapiens
CARSRAFWYSSDTFYTIDYW

SEQ ID NO: 49888 - protein, 23 aa, Homo sapiens
CTTEGEYSSSAFLWLQWAPFDYW

SEQ ID NO: 49889 - protein, 21 aa, Homo sapiens
CARDHSSGWFPSAPSDAFDIW

SEQ ID NO: 49890 - protein, 36 aa, Homo sapiens
CSLKLTSVTAADTSVYYCATVPSSRGWSAFYHFDNW

SEQ ID NO: 49891 - protein, 26 aa, Homo sapiens
CAKRCPHVVPAALFGYGGYVDYFDYW

SEQ ID NO: 49892 - protein, 16 aa, Homo sapiens
CARSRIAPDHFYFDYW

SEQ ID NO: 49893 - protein, 19 aa, Homo sapiens
CARANSAWYDDSYFYMDVW

SEQ ID NO: 49894 - protein, 14 aa, Homo sapiens
CARGERFVGLFDPW

SEQ ID NO: 49895 - protein, 20 aa, Homo sapiens
CARNPPSQLGNYYYYYMDVW

SEQ ID NO: 49896 - protein, 19 aa, Homo sapiens
CAKQVGQFAAAGIYYFDYW

SEQ ID NO: 49897 - protein, 24 aa, Homo sapiens
CARDRGGNYYGSGSPRYHYAMDVW

SEQ ID NO: 49898 - protein, 18 aa, Homo sapiens
CARRGYSSSWYLDAFDIW

SEQ ID NO: 49899 - protein, 31 aa, Homo sapiens
CAKVGPEVDPLNVYDFWSVMGSYYYYGMDVW

SEQ ID NO: 49900 - protein, 26 aa, Homo sapiens
CARGNSGWSSTRFAITSNYYYYMDVW

SEQ ID NO: 49901 - protein, 18 aa, Homo sapiens
CAKGVRFLEWLLSPTDYW

SEQ ID NO: 49902 - protein, 24 aa, Homo sapiens
CTRDVGPSNTYYYDSGRDTWFDPW

SEQ ID NO: 49903 - protein, 15 aa, Homo sapiens
CASFGYSYGPSHDYW

SEQ ID NO: 49904 - protein, 15 aa, Homo sapiens
CATARLLVFDALDIW

SEQ ID NO: 49905 - protein, 15 aa, Homo sapiens
CARHFEDLLSGFDFW

SEQ ID NO: 49906 - protein, 12 aa, Homo sapiens
CTSFISDASDIW

SEQ ID NO: 49907 - protein, 21 aa, Homo sapiens
CATTDYYGLRHDYAGSWLDPW

SEQ ID NO: 49908 - protein, 18 aa, Homo sapiens
CTRVWGTAMVTGDYFDYW

SEQ ID NO: 49909 - protein, 24 aa, Homo sapiens
CARDPERYDFWSGYYQNAPELDYW

SEQ ID NO: 49910 - protein, 14 aa, Homo sapiens
CARGWELLPAFDVW

SEQ ID NO: 49911 - protein, 22 aa, Homo sapiens
CARSPSYNDYVWGSYDRRFDYW

SEQ ID NO: 49912 - protein, 22 aa, Homo sapiens
CARVPSPTMIVVVTYENAFDIW

SEQ ID NO: 49913 - protein, 15 aa, Homo sapiens
CTREYSNGHPFVDYW

SEQ ID NO: 49914 - protein, 23 aa, Homo sapiens
CARDFTHYSEVRGGSPGDDFDYW

SEQ ID NO: 49915 - protein, 21 aa, Homo sapiens
CARARSRYYYDSSGYYVFDYW

SEQ ID NO: 49916 - protein, 20 aa, Homo sapiens
CARSIYSNPTKPYYYGMDVW

SEQ ID NO: 49917 - protein, 17 aa, Homo sapiens
CARLQYSGYDDGGLDYW

SEQ ID NO: 49918 - protein, 21 aa, Homo sapiens
CARSYYDFWSGYLNAGAFDIW

SEQ ID NO: 49919 - protein, 15 aa, Homo sapiens
CARVWFGDYYYMDVW

SEQ ID NO: 49920 - protein, 12 aa, Homo sapiens
CAKVSGSYGSYW

SEQ ID NO: 49921 - protein, 17 aa, Homo sapiens
CARERSGSWVSVYFDYW

SEQ ID NO: 49922 - protein, 19 aa, Homo sapiens
CARGGRFLEWSDEYYFDYW

SEQ ID NO: 49923 - protein, 17 aa, Homo sapiens
CAKGQSSPYYYYSMDVW

SEQ ID NO: 49924 - protein, 15 aa, Homo sapiens
CQSADRSGPYGHVVF

SEQ ID NO: 49925 - protein, 19 aa, Homo sapiens
CARNRESGYNYALYYFDFW

SEQ ID NO: 49926 - protein, 21 aa, Homo sapiens
CARHVTQYYYDSSGYSEFDYW

SEQ ID NO: 49927 - protein, 19 aa, Homo sapiens
CAKDGSIRDLYYYYYMDVW

SEQ ID NO: 49928 - protein, 19 aa, Homo sapiens
CARSKSFRSCNLCGAFDMW

SEQ ID NO: 49929 - protein, 17 aa, Homo sapiens
CARAETVINYFYYMDVW

SEQ ID NO: 49930 - protein, 21 aa, Homo sapiens
CAHRRGYDSSGYLGDDAFDIW

SEQ ID NO: 49931 - protein, 26 aa, Homo sapiens
CARDREMLTFADSIENYNYHYYMDVW

SEQ ID NO: 49932 - protein, 19 aa, Homo sapiens
CAREYDPFGVGYYYGMDVW

SEQ ID NO: 49933 - protein, 24 aa, Homo sapiens
CARLSKDDFWSGYRLYYYYGMDVW

SEQ ID NO: 49934 - protein, 20 aa, Homo sapiens
CARNNFVLYSGPGSYAMDVW

SEQ ID NO: 49935 - protein, 16 aa, Homo sapiens
CARHPRPVVIGHFDYW

SEQ ID NO: 49936 - protein, 22 aa, Homo sapiens
CARSGVVFTVFPSDQYYALDVW

SEQ ID NO: 49937 - protein, 17 aa, Homo sapiens
CAREGLAAVAGYYFDYW

SEQ ID NO: 49938 - protein, 23 aa, Homo sapiens
CARDPNDYYGSGSYYQRPSIDYW

SEQ ID NO: 49939 - protein, 29 aa, Homo sapiens
CARVAQVPYYDSSGYYYAPWDYYYGMDVW

SEQ ID NO: 49940 - protein, 16 aa, Homo sapiens
CVKVMSSGWSDGFDIW

SEQ ID NO: 49941 - protein, 16 aa, Homo sapiens
CARDQYQLPQGGFDYW

SEQ ID NO: 49942 - protein, 17 aa, Homo sapiens
CAKDIGGSGSDYTFEYW

SEQ ID NO: 49943 - protein, 19 aa, Homo sapiens
CARPGTDYDSSGHGAFDIW

SEQ ID NO: 49944 - protein, 40 aa, Homo sapiens
CALPISTSTVYMELSSLRSEDTAVYYCASGGHGDWLFDYW

SEQ ID NO: 49945 - protein, 17 aa, Homo sapiens
CGRLPTYCGGDCYVEYW

SEQ ID NO: 49946 - protein, 19 aa, Homo sapiens
CAKDLGAGLENYYNIIDSW

SEQ ID NO: 49947 - protein, 24 aa, Homo sapiens
CVREGTYSDIWRRTPQYYYYMDVW

SEQ ID NO: 49948 - protein, 21 aa, Homo sapiens
CTTRGYCSGGSCYSRNRFDYW

SEQ ID NO: 49949 - protein, 21 aa, Homo sapiens
CARGKTARIQLWLVDNWFDPW

SEQ ID NO: 49950 - protein, 22 aa, Homo sapiens
CARVPPYYYDTSGHVVGAFDVW

SEQ ID NO: 49951 - protein, 17 aa, Homo sapiens
CTRSPETSDYNYAMDVW

SEQ ID NO: 49952 - protein, 18 aa, Homo sapiens
CARDDGFGDFDRGYFDHW

SEQ ID NO: 49953 - protein, 18 aa, Homo sapiens
CTRDPTIFGVGVNWFDPW

SEQ ID NO: 49954 - protein, 24 aa, Homo sapiens
CARNQGEGYCPSGGCFPENGFDIW

SEQ ID NO: 49955 - protein, 19 aa, Homo sapiens
CARDPRAPYSSSAEYFQHW

SEQ ID NO: 49956 - protein, 22 aa, Homo sapiens
CARVPSYYYDSSGYYPGPFDYW

SEQ ID NO: 49957 - protein, 16 aa, Homo sapiens
CARGVGYTYVVLYDYW

SEQ ID NO: 49958 - protein, 14 aa, Homo sapiens
CAREPRETCYFDYW

SEQ ID NO: 49959 - protein, 20 aa, Homo sapiens
CARILGDSSGYYLFYYFDYW

SEQ ID NO: 49960 - protein, 17 aa, Homo sapiens
CAKDIAAAGLVGLFDPW

SEQ ID NO: 49961 - protein, 22 aa, Homo sapiens
CARHSLGTIFGVVIAEYYFDYW

SEQ ID NO: 49962 - protein, 20 aa, Homo sapiens
CARPKDYGGNPVSLDAFDIW

SEQ ID NO: 49963 - protein, 17 aa, Homo sapiens
CAREDGIVGVTSAFDIW

SEQ ID NO: 49964 - protein, 24 aa, Homo sapiens
CARDLITGTTSRPNYYYYYGMDVW

SEQ ID NO: 49965 - protein, 15 aa, Homo sapiens
CARSKLELLAYFDYW

SEQ ID NO: 49966 - protein, 25 aa, Homo sapiens
CAKSIELDQWIQLWSAVHQGAFDIW

SEQ ID NO: 49967 - protein, 29 aa, Homo sapiens
CARLPKEDLYIYTLGYCTGGVCNNWFDPW

SEQ ID NO: 49968 - protein, 15 aa, Homo sapiens
CARCPAAGAYYVDQW

SEQ ID NO: 49969 - protein, 22 aa, Homo sapiens
CARDSLGYYDSSGHTHAAFDIW

SEQ ID NO: 49970 - protein, 21 aa, Homo sapiens
CARASTMIVVVITTVNAFDIW

SEQ ID NO: 49971 - protein, 24 aa, Homo sapiens
CARAFSGVYDSSGYYLVYYYMDVW

SEQ ID NO: 49972 - protein, 23 aa, Homo sapiens
CASSLWTTVNYGWNDYYYGMDVW

SEQ ID NO: 49973 - protein, 23 aa, Homo sapiens
CARDARPRTIYSSGWGGPGFDYW

SEQ ID NO: 49974 - protein, 22 aa, Homo sapiens
CARHRWGYSYGNYYYYYGMDVW

SEQ ID NO: 49975 - protein, 21 aa, Homo sapiens
CARSGARLVVIPPGMRYFDLW

SEQ ID NO: 49976 - protein, 26 aa, Homo sapiens
CARGSGSPLITIFGVVPNYYYGMDVW

SEQ ID NO: 49977 - protein, 20 aa, Homo sapiens
CARDTDYDFWSGYYYYFDYW

SEQ ID NO: 49978 - protein, 18 aa, Homo sapiens
CATDPQNRPGGVFFYDYW

SEQ ID NO: 49979 - protein, 22 aa, Homo sapiens
CARWGRNYYDSSGYYPHPYDYW

SEQ ID NO: 49980 - protein, 22 aa, Homo sapiens
CARGRDVNTAMVEVNCHYMDVW

SEQ ID NO: 49981 - protein, 20 aa, Homo sapiens
CARGGVTPKAGYYYYYMDVW

SEQ ID NO: 49982 - protein, 18 aa, Homo sapiens
CATIGPLVVVRYNWFDPW

SEQ ID NO: 49983 - protein, 12 aa, Homo sapiens
CIRELSGKDDYW

SEQ ID NO: 49984 - protein, 21 aa, Homo sapiens
CARDYYDSSGYYYGAEYFQHW

SEQ ID NO: 49985 - protein, 22 aa, Homo sapiens
CAKDHPPTHVGIDSSGYYFGYW

SEQ ID NO: 49986 - protein, 20 aa, Homo sapiens
CAKDMYPLNYDSSVGAFDIW

SEQ ID NO: 49987 - protein, 28 aa, Homo sapiens
CARIMVEYYYDSSGYPKIAVKEYYFDYW

SEQ ID NO: 49988 - protein, 20 aa, Homo sapiens
CAKIAGIAGVYYDSSGADYW

SEQ ID NO: 49989 - protein, 18 aa, Homo sapiens
CAKAITMIVVDWYYFDYW

SEQ ID NO: 49990 - protein, 28 aa, Homo sapiens
CARENIVAVPASIWNMEDYYYYRGMDVW

SEQ ID NO: 49991 - protein, 18 aa, Homo sapiens
CAKDSPPDSSSSRSLDYW

SEQ ID NO: 49992 - protein, 23 aa, Homo sapiens
CAKDVSPDYGDSDYYYYYGMDVW

SEQ ID NO: 49993 - protein, 14 aa, Homo sapiens
CHQYNNWPRDPWTF

SEQ ID NO: 49994 - protein, 23 aa, Homo sapiens
CARGIHYDFWSGSLWGPHYFDYW

SEQ ID NO: 49995 - protein, 20 aa, Homo sapiens
CVRHGPYYCGADCHDAFDIW

SEQ ID NO: 49996 - protein, 20 aa, Homo sapiens
CARGTGVHYDSSGYSSPDYW

SEQ ID NO: 49997 - protein, 14 aa, Homo sapiens
CAKEGTVEMALDYW

SEQ ID NO: 49998 - protein, 17 aa, Homo sapiens
CTRESVGVSGTNAFDIW

SEQ ID NO: 49999 - protein, 18 aa, Homo sapiens
CVRHEGERWQPRYLFDNW

SEQ ID NO: 50000 - protein, 23 aa, Homo sapiens
CAHRAEAALTQAIRYYYYGMDVW

SEQ ID NO: 50001 - protein, 21 aa, Homo sapiens
CARHRTEDIVLVVYATDFDYW

SEQ ID NO: 50002 - protein, 22 aa, Homo sapiens
CARPTYYYDSSGYYYAVPFDYW

SEQ ID NO: 50003 - protein, 17 aa, Homo sapiens
CATGRYCSTIYCSFDYW

SEQ ID NO: 50004 - protein, 20 aa, Homo sapiens
CARVSRSITFGGVIAQIDYW

SEQ ID NO: 50005 - protein, 14 aa, Homo sapiens
CNSRDSSDNHGWLF

SEQ ID NO: 50006 - protein, 14 aa, Homo sapiens
CANTHSIHDAFAIW

SEQ ID NO: 50007 - protein, 20 aa, Homo sapiens
CARENRARLLFDYYYYMDVW

SEQ ID NO: 50008 - protein, 19 aa, Homo sapiens
CARENGGRQWLDNNWFDPW

SEQ ID NO: 50009 - protein, 16 aa, Homo sapiens
CSRDFVEYSSSPFDCW

SEQ ID NO: 50010 - protein, 18 aa, Homo sapiens
CAREATGSGWYTKAFDIW

SEQ ID NO: 50011 - protein, 18 aa, Homo sapiens
CARFLWWELLPGDAFDIW

SEQ ID NO: 50012 - protein, 14 aa, Homo sapiens
CTRDDFWSGYSDYW

SEQ ID NO: 50013 - protein, 17 aa, Homo sapiens
CARGFYGSGSPRPFDIW

SEQ ID NO: 50014 - protein, 24 aa, Homo sapiens
CTRTLVDGFWSGHEYIYSYGMDVW

SEQ ID NO: 50015 - protein, 16 aa, Homo sapiens
CARSGGYSYGGAFDYW

SEQ ID NO: 50016 - protein, 19 aa, Homo sapiens
CAKDMGYGLLQLPSYFDYW

SEQ ID NO: 50017 - protein, 22 aa, Homo sapiens
CARELYYYDSSGYYYGDAFDIW

SEQ ID NO: 50018 - protein, 18 aa, Homo sapiens
CAKSGYSYGYLSYYFDYW

SEQ ID NO: 50019 - protein, 26 aa, Homo sapiens
CARAAFHYDFWSTHGIWGEGYYMDVW

SEQ ID NO: 50020 - protein, 21 aa, Homo sapiens
CARGGGFWSGSPYYYYYMDVW

SEQ ID NO: 50021 - protein, 14 aa, Homo sapiens
CASGAIVGNFVDYW

SEQ ID NO: 50022 - protein, 17 aa, Homo sapiens
CARDRSPDPASDAFDIW

SEQ ID NO: 50023 - protein, 21 aa, Homo sapiens
CARVQRITIFGVVIVGPFDYW

SEQ ID NO: 50024 - protein, 18 aa, Homo sapiens
CAKDHFIAADYYYGMDVW

SEQ ID NO: 50025 - protein, 19 aa, Homo sapiens
CARADRGGDFWSGSPFEYW

SEQ ID NO: 50026 - protein, 15 aa, Homo sapiens
CARGGSRLWLMDDYW

SEQ ID NO: 50027 - protein, 17 aa, Homo sapiens
CAKLLTPYGSGTSSDYW

SEQ ID NO: 50028 - protein, 18 aa, Homo sapiens
CARERGHPWLVDNWFDPW

SEQ ID NO: 50029 - protein, 15 aa, Homo sapiens
CARGYNWNYAWFDPW

SEQ ID NO: 50030 - protein, 20 aa, Homo sapiens
CARWPNYDSSGYFTQPFDYW

SEQ ID NO: 50031 - protein, 19 aa, Homo sapiens
CAKGWGLNRSLLGGFFDSW

SEQ ID NO: 50032 - protein, 27 aa, Homo sapiens
CARGYYGSGSYYGVGMEKYYYYYMDVW

SEQ ID NO: 50033 - protein, 27 aa, Homo sapiens
CTSPFSSPRTIFGVVIRDPYYYGMDVW

SEQ ID NO: 50034 - protein, 19 aa, Homo sapiens
CAKEGTTYYYDSSGPFDPW

SEQ ID NO: 50035 - protein, 31 aa, Homo sapiens
CARGPWYSSSWYQKMALGGFPPPYYYGMDVW

SEQ ID NO: 50036 - protein, 22 aa, Homo sapiens
CAKDDYVWGSYRYSHLNWFDPW

SEQ ID NO: 50037 - protein, 19 aa, Homo sapiens
CARDLTAMVTNRGYYFDYW

SEQ ID NO: 50038 - protein, 19 aa, Homo sapiens
CARDPSIRQQLVRDAFDIW

SEQ ID NO: 50039 - protein, 17 aa, Homo sapiens
CARFPYGDYLFGYMDVW

SEQ ID NO: 50040 - protein, 22 aa, Homo sapiens
CAKDLRPSITMIVVVIGDFDYW

SEQ ID NO: 50041 - protein, 21 aa, Homo sapiens
CAREWRVITIFGVVTDGEDVW

SEQ ID NO: 50042 - protein, 16 aa, Homo sapiens
CARASQRETFDAFDIW

SEQ ID NO: 50043 - protein, 18 aa, Homo sapiens
CAKNLYYYGSGLGYFDYW

SEQ ID NO: 50044 - protein, 17 aa, Homo sapiens
CAKNKGGSAAPDYFDNW

SEQ ID NO: 50045 - protein, 15 aa, Homo sapiens
CARATSGSFGWFDPW

SEQ ID NO: 50046 - protein, 21 aa, Homo sapiens
CARDDRSAAANNLIPYGGDYW

SEQ ID NO: 50047 - protein, 20 aa, Homo sapiens
CAKDGPYYYDSSGYYTFDSW

SEQ ID NO: 50048 - protein, 19 aa, Homo sapiens
CAHSYYDILSGWSYYFDYW

SEQ ID NO: 50049 - protein, 17 aa, Homo sapiens
CTRDPDSGDYLEYFQHW

SEQ ID NO: 50050 - protein, 26 aa, Homo sapiens
CARDPALYDYVWGSYRPYYYYGMDVW

SEQ ID NO: 50051 - protein, 20 aa, Homo sapiens
CARDPYYYDSSGYSQDPDYW

SEQ ID NO: 50052 - protein, 17 aa, Homo sapiens
CATERGQTTIRYGFDMW

SEQ ID NO: 50053 - protein, 14 aa, Homo sapiens
CASPTVTKRQKDYW

SEQ ID NO: 50054 - protein, 26 aa, Homo sapiens
CARDYKAPTAELRFLEWFAWNWFDPW

SEQ ID NO: 50055 - protein, 18 aa, Homo sapiens
CAKDGSFWLFTPYYFDYW

SEQ ID NO: 50056 - protein, 19 aa, Homo sapiens
CAKAASKAVAGSAYYFDYW

SEQ ID NO: 50057 - protein, 19 aa, Homo sapiens
CARDNSYEGLPYFYYLDVW

SEQ ID NO: 50058 - protein, 17 aa, Homo sapiens
CARDIFHSYGRSPFDIW

SEQ ID NO: 50059 - protein, 17 aa, Homo sapiens
CARGFGGGGSSDALDIW

SEQ ID NO: 50060 - protein, 14 aa, Homo sapiens
CAKVQTNYDAFDIW

SEQ ID NO: 50061 - protein, 14 aa, Homo sapiens
CARVRRDGYNFDYW

SEQ ID NO: 50062 - protein, 19 aa, Homo sapiens
CARPDSSGWYFFGTRFDYW

SEQ ID NO: 50063 - protein, 16 aa, Homo sapiens
CAAWDDSLNGPRAPVF

SEQ ID NO: 50064 - protein, 21 aa, Homo sapiens
CARVGLSGSAFSPLGNWFDPW

SEQ ID NO: 50065 - protein, 24 aa, Homo sapiens
CAKWILTLPYYDFWSGYSGWFDPW

SEQ ID NO: 50066 - protein, 22 aa, Homo sapiens
CARASFEAIRWLQFLPRLFDYW

SEQ ID NO: 50067 - protein, 25 aa, Homo sapiens
CAKDRGGGYCSGGSCYGYYYGMDVW

SEQ ID NO: 50068 - protein, 19 aa, Homo sapiens
CAKDRITIFGVVILSFDYW

SEQ ID NO: 50069 - protein, 19 aa, Homo sapiens
CARDGTVNDYGDLDAFDLW

SEQ ID NO: 50070 - protein, 20 aa, Homo sapiens
CARDQDYYSWGANRNWFDPW

SEQ ID NO: 50071 - protein, 19 aa, Homo sapiens
CAKDSAVVLMVYVPWFDPW

SEQ ID NO: 50072 - protein, 14 aa, Homo sapiens
CVTHREYLLPFDYW

SEQ ID NO: 50073 - protein, 22 aa, Homo sapiens
CATVGFVRIAARPHYYYGMDVW

SEQ ID NO: 50074 - protein, 16 aa, Homo sapiens
CARLVLLTEWNYFDYW

SEQ ID NO: 50075 - protein, 19 aa, Homo sapiens
CAKDGGVNSSGWANHFDYW

SEQ ID NO: 50076 - protein, 15 aa, Homo sapiens
CARGGLQLWFMFEYW

SEQ ID NO: 50077 - protein, 18 aa, Homo sapiens
CAKVYDSQERGAYYFDYW

SEQ ID NO: 50078 - protein, 17 aa, Homo sapiens
CAKMVYAIGGGYYFDYW

SEQ ID NO: 50079 - protein, 24 aa, Homo sapiens
CAREAVIAVAGVLLPVYYYYMDVW

SEQ ID NO: 50080 - protein, 23 aa, Homo sapiens
CARERHYDFWSGYYFLYYYMDVW

SEQ ID NO: 50081 - protein, 22 aa, Homo sapiens
CARDLGWVVVTAIGGYFGFDIW

SEQ ID NO: 50082 - protein, 22 aa, Homo sapiens
CARIQFTLANGDLAGPYYFDYW

SEQ ID NO: 50083 - protein, 22 aa, Homo sapiens
CARAEYYYDSSGYYYGWYFDLW

SEQ ID NO: 50084 - protein, 16 aa, Homo sapiens
CAGGVRGAMVTGFDYW

SEQ ID NO: 50085 - protein, 24 aa, Homo sapiens
CARDMAITIFGVVPPGYYYGMDVW

SEQ ID NO: 50086 - protein, 14 aa, Homo sapiens
CISRDPSGNHFRVF

SEQ ID NO: 50087 - protein, 21 aa, Homo sapiens
CTKGPYYDFWNGYYTSYFEYW

SEQ ID NO: 50088 - protein, 19 aa, Homo sapiens
CARTNYDILTGVAYYFDYW

SEQ ID NO: 50089 - protein, 18 aa, Homo sapiens
CAKASQGAYYDSSGLDYW

SEQ ID NO: 50090 - protein, 21 aa, Homo sapiens
CARHVGALLWFGELWDWFDPW

SEQ ID NO: 50091 - protein, 16 aa, Homo sapiens
CARRGLSGWYWGFDYW

SEQ ID NO: 50092 - protein, 14 aa, Homo sapiens
CASRSSGWYHFDNW

SEQ ID NO: 50093 - protein, 22 aa, Homo sapiens
CANPIVVVVAATQKGRHAFDIW

SEQ ID NO: 50094 - protein, 18 aa, Homo sapiens
CAKALAARHLYYYGMDVW

SEQ ID NO: 50095 - protein, 14 aa, Homo sapiens
CAIHHYGVFSFDYW

SEQ ID NO: 50096 - protein, 18 aa, Homo sapiens
CARFPPSEDSSGSLLDYW

SEQ ID NO: 50097 - protein, 22 aa, Homo sapiens
CARDLTVTTLGPRYYYYGMDVW

SEQ ID NO: 50098 - protein, 25 aa, Homo sapiens
CAREAWDSSSWYVGSVYYYYYMDVW

SEQ ID NO: 50099 - protein, 14 aa, Homo sapiens
CQSYDTSLTAHVVF

SEQ ID NO: 50100 - protein, 14 aa, Homo sapiens
CASYITVPEFFQHW

SEQ ID NO: 50101 - protein, 15 aa, Homo sapiens
CAHRPFLWKGWFDPW

SEQ ID NO: 50102 - protein, 16 aa, Homo sapiens
CAKVQLWLLEVPFDYW

SEQ ID NO: 50103 - protein, 13 aa, Homo sapiens
CARDRGPGVHDYW

SEQ ID NO: 50104 - protein, 15 aa, Homo sapiens
CAKDRLGAARYFDYW

SEQ ID NO: 50105 - protein, 21 aa, Homo sapiens
CAKAAFYFDSSGYSLGWFDPW

SEQ ID NO: 50106 - protein, 21 aa, Homo sapiens
CARIGGGYGGNFELDDAFDIW

SEQ ID NO: 50107 - protein, 19 aa, Homo sapiens
CAKEDYGDYWVYYYYMDVW

SEQ ID NO: 50108 - protein, 19 aa, Homo sapiens
CARAGYTSGWSHYFYMDVW

SEQ ID NO: 50109 - protein, 20 aa, Homo sapiens
CTTAPVVYARSYYYYYMDVW

SEQ ID NO: 50110 - protein, 23 aa, Homo sapiens
CARGRVWFGEYLSLYYYYGMDVW

SEQ ID NO: 50111 - protein, 24 aa, Homo sapiens
CASLRRGPGILTGRDAGRDALDIW

SEQ ID NO: 50112 - protein, 15 aa, Homo sapiens
CARGPLTPMVEIDYW

SEQ ID NO: 50113 - protein, 16 aa, Homo sapiens
CARAQFGSTWYSYDYW

SEQ ID NO: 50114 - protein, 24 aa, Homo sapiens
CAREQRDFWSGPRYYYYYYYMDVW

SEQ ID NO: 50115 - protein, 21 aa, Homo sapiens
CAKDTASGGGPWIPTAWFDSW

SEQ ID NO: 50116 - protein, 18 aa, Homo sapiens
CARADSSGYVERYAFDIW

SEQ ID NO: 50117 - protein, 17 aa, Homo sapiens
CARDLAGVPAAIGFDYW

SEQ ID NO: 50118 - protein, 28 aa, Homo sapiens
CARSGALRFLEWLPPPGDYYYYYGMDVW

SEQ ID NO: 50119 - protein, 18 aa, Homo sapiens
CARQDSTGYYYANAFDFW

SEQ ID NO: 50120 - protein, 19 aa, Homo sapiens
CARDRFQYASGLDDSFDLW

SEQ ID NO: 50121 - protein, 18 aa, Homo sapiens
CASCASDIYYYYYGMDVW

SEQ ID NO: 50122 - protein, 15 aa, Homo sapiens
CARHQTAMVDGGDYW

SEQ ID NO: 50123 - protein, 22 aa, Homo sapiens
CARDCGGSCYWALNYYYYMDVW

SEQ ID NO: 50124 - protein, 18 aa, Homo sapiens
CARGYCSSTSCPNWFDPW

SEQ ID NO: 50125 - protein, 19 aa, Homo sapiens
CARDNGVDYYDSLYYFDYW

SEQ ID NO: 50126 - protein, 15 aa, Homo sapiens
CAKDLYSSLTGADYW

SEQ ID NO: 50127 - protein, 15 aa, Homo sapiens
CARDWGGTGTNMDYW

SEQ ID NO: 50128 - protein, 18 aa, Homo sapiens
CAREITMVRGVFNWFDPW

SEQ ID NO: 50129 - protein, 25 aa, Homo sapiens
CAHSDVLLRIGELSPVWDPGSFDYW

SEQ ID NO: 50130 - protein, 23 aa, Homo sapiens
CARTYYDFWSGYYTGIWGISDYW

SEQ ID NO: 50131 - protein, 18 aa, Homo sapiens
CARDGFYGDYEVGWFDPW

SEQ ID NO: 50132 - protein, 19 aa, Homo sapiens
CAKVWRVELLLSGAGFDYW

SEQ ID NO: 50133 - protein, 22 aa, Homo sapiens
CARGAIPSPSFWEWSRRAFDYW

SEQ ID NO: 50134 - protein, 18 aa, Homo sapiens
CARAWGVLMTAVSGFDPW

SEQ ID NO: 50135 - protein, 32 aa, Homo sapiens
CSLRSEDTAVYYCARQEISSWQYYYYYYMDVW

SEQ ID NO: 50136 - protein, 13 aa, Homo sapiens
CATRAVAGSDDYW

SEQ ID NO: 50137 - protein, 13 aa, Homo sapiens
CARDWENGSNDYW

SEQ ID NO: 50138 - protein, 22 aa, Homo sapiens
CASEDGKAARTDYYYYYGMDVW

SEQ ID NO: 50139 - protein, 16 aa, Homo sapiens
CATGLGQGTYYYFVYW

SEQ ID NO: 50140 - protein, 24 aa, Homo sapiens
CAKDRSYGGAMVTTYYYYYGMDVW

SEQ ID NO: 50141 - protein, 18 aa, Homo sapiens
CATEVVVVAATHYERDYW

SEQ ID NO: 50142 - protein, 14 aa, Homo sapiens
CAKGPTFYTSADYW

SEQ ID NO: 50143 - protein, 19 aa, Homo sapiens
CAKGGYYDSSGYETRLDYW

SEQ ID NO: 50144 - protein, 16 aa, Homo sapiens
CAALRLGDLPSASDYW

SEQ ID NO: 50145 - protein, 14 aa, Homo sapiens
CARHVPAGTGNDYW

SEQ ID NO: 50146 - protein, 19 aa, Homo sapiens
CAKPWYSSGYYPIDAFDIW

SEQ ID NO: 50147 - protein, 21 aa, Homo sapiens
CAKDRGSGSYYGVWTPEFDYW

SEQ ID NO: 50148 - protein, 20 aa, Homo sapiens
CAREGERQLVLRYYYYMDVW

SEQ ID NO: 50149 - protein, 14 aa, Homo sapiens
CARENEELYGFDPW

SEQ ID NO: 50150 - protein, 20 aa, Homo sapiens
CARQNMITFGGVIVRSFDYW

SEQ ID NO: 50151 - protein, 18 aa, Homo sapiens
CVSYIGSYTVRYKWFDPW

SEQ ID NO: 50152 - protein, 22 aa, Homo sapiens
CTRHVDQLRYDFWSGYPFFDYW

SEQ ID NO: 50153 - protein, 23 aa, Homo sapiens
CARTVNGFVGYGYFLNYYYMDVW

SEQ ID NO: 50154 - protein, 17 aa, Homo sapiens
CARSYSGYDADDAFDIW

SEQ ID NO: 50155 - protein, 18 aa, Homo sapiens
CAKTYSSGWYLFYYFDYW

SEQ ID NO: 50156 - protein, 16 aa, Homo sapiens
CARHSAVRGPRWFDPW

SEQ ID NO: 50157 - protein, 10 aa, Homo sapiens
CARYWYFDLW

SEQ ID NO: 50158 - protein, 18 aa, Homo sapiens
CARDWQHNWNDVGYFDYW

SEQ ID NO: 50159 - protein, 22 aa, Homo sapiens
CAREKAPSTFQFLEWLSPFDYW

SEQ ID NO: 50160 - protein, 18 aa, Homo sapiens
CARHKAPGYNYLAAFDIW

SEQ ID NO: 50161 - protein, 21 aa, Homo sapiens
CATKHQGSCRGDSCYSPFDYW

SEQ ID NO: 50162 - protein, 24 aa, Homo sapiens
CARGGGDLQLWPVPTYYYYYMDVW

SEQ ID NO: 50163 - protein, 12 aa, Homo sapiens
CARRSRGAFDLW

SEQ ID NO: 50164 - protein, 14 aa, Homo sapiens
CARGGAAVSAPDYW

SEQ ID NO: 50165 - protein, 20 aa, Homo sapiens
CAKDEDYNSWGGNANWFDPW

SEQ ID NO: 50166 - protein, 22 aa, Homo sapiens
CATDAVITMVRGVIAWDAFDIW

SEQ ID NO: 50167 - protein, 28 aa, Homo sapiens
CARACYYDSSGYYHPGQGYYYFYGMDVW

SEQ ID NO: 50168 - protein, 21 aa, Homo sapiens
CAREGIVVVPVPYYYYGMDVW

SEQ ID NO: 50169 - protein, 14 aa, Homo sapiens
CANLEVVINPFDYW

SEQ ID NO: 50170 - protein, 12 aa, Homo sapiens
CMIWPTNTSGVF

SEQ ID NO: 50171 - protein, 20 aa, Homo sapiens
CAKANFGVVIIGYYYYMDVW

SEQ ID NO: 50172 - protein, 23 aa, Homo sapiens
CAILGGIVVVPAAPSKQRYFDLW

SEQ ID NO: 50173 - protein, 21 aa, Homo sapiens
CARDPGYDYVWGSYRSHFDYW

SEQ ID NO: 50174 - protein, 20 aa, Homo sapiens
CARRRTRASMIVAYGVFDVW

SEQ ID NO: 50175 - protein, 15 aa, Homo sapiens
CAREPHAHLWGCDYW

SEQ ID NO: 50176 - protein, 18 aa, Homo sapiens
CAAPYCSGGSCNDAFDIW

SEQ ID NO: 50177 - protein, 17 aa, Homo sapiens
CAKDRDELGYREYLDSW

SEQ ID NO: 50178 - protein, 16 aa, Homo sapiens
CVSSGSPTPYDAFDIW

SEQ ID NO: 50179 - protein, 24 aa, Homo sapiens
CARDTGESIAVAGIYYYYYYMDVW

SEQ ID NO: 50180 - protein, 23 aa, Homo sapiens
CTTESFSRATVGHYYYFHYMDVW

SEQ ID NO: 50181 - protein, 15 aa, Homo sapiens
CAHSVDWLYDAFDIW

SEQ ID NO: 50182 - protein, 28 aa, Homo sapiens
CARDSVEYYDSSGYYRKYYYYYYGMDVW

SEQ ID NO: 50183 - protein, 17 aa, Homo sapiens
CARRPTGYSSSWYFDYW

SEQ ID NO: 50184 - protein, 23 aa, Homo sapiens
CARDGHPNYDFWSGPYYYYMDVW

SEQ ID NO: 50185 - protein, 18 aa, Homo sapiens
CARGSHDNRNRRRHFDYW

SEQ ID NO: 50186 - protein, 14 aa, Homo sapiens
CAKLYKKGSPGDYW

SEQ ID NO: 50187 - protein, 19 aa, Homo sapiens
CASVAAAGTLSYYYGMDVW

SEQ ID NO: 50188 - protein, 23 aa, Homo sapiens
CARDRKYSSGWYQTTPSGGVDYW

SEQ ID NO: 50189 - protein, 17 aa, Homo sapiens
CATASVWVAQANWFDPW

SEQ ID NO: 50190 - protein, 17 aa, Homo sapiens
CARDPPYDTSDYPTDYW

SEQ ID NO: 50191 - protein, 18 aa, Homo sapiens
CAKTASPYYYYYYGMDVW

SEQ ID NO: 50192 - protein, 18 aa, Homo sapiens
CGKGLGGGIDVGLEFDYW

SEQ ID NO: 50193 - protein, 24 aa, Homo sapiens
CARSRSIAVAGTLILSYYYYMDVW

SEQ ID NO: 50194 - protein, 23 aa, Homo sapiens
CARLPIARRGYSYGTPLVAFDIW

SEQ ID NO: 50195 - protein, 12 aa, Homo sapiens
CQQRYNRPLLAF

SEQ ID NO: 50196 - protein, 17 aa, Homo sapiens
CARVILRYFDWDRFDFW

SEQ ID NO: 50197 - protein, 16 aa, Homo sapiens
CAKGLSSPGDNWFDPW

SEQ ID NO: 50198 - protein, 17 aa, Homo sapiens
CARVRSYYSLQDAIDIW

SEQ ID NO: 50199 - protein, 15 aa, Homo sapiens
CAKAAPYGGYSSDYW

SEQ ID NO: 50200 - protein, 19 aa, Homo sapiens
CARDGGLTVVITTYYFDYW

SEQ ID NO: 50201 - protein, 22 aa, Homo sapiens
CARGGYITIFGVVTAPGAFDIW

SEQ ID NO: 50202 - protein, 17 aa, Homo sapiens
CARVVKDIYGYPYFDYW

SEQ ID NO: 50203 - protein, 24 aa, Homo sapiens
CARPTKATHDILRGYYYYYYMDVW

SEQ ID NO: 50204 - protein, 19 aa, Homo sapiens
CAKDYYGSGSYWTDLFDYW

SEQ ID NO: 50205 - protein, 27 aa, Homo sapiens
CARAYTADYDFWSGYYKRYYYYYMDVW

SEQ ID NO: 50206 - protein, 18 aa, Homo sapiens
CAKVLDSYGYYYYGMDVW

SEQ ID NO: 50207 - protein, 19 aa, Homo sapiens
CASWSTLTGGIAAAEFDYW

SEQ ID NO: 50208 - protein, 18 aa, Homo sapiens
CARITACGWSPYWYFDLW

SEQ ID NO: 50209 - protein, 16 aa, Homo sapiens
CAREAAVTDNYYFDYW

SEQ ID NO: 50210 - protein, 18 aa, Homo sapiens
CARLGATTMRYYYGMDVW

SEQ ID NO: 50211 - protein, 17 aa, Homo sapiens
CAKEPGYSYGYGYFDHW

SEQ ID NO: 50212 - protein, 15 aa, Homo sapiens
CAKDGKSFPYYFDYW

SEQ ID NO: 50213 - protein, 15 aa, Homo sapiens
CARDVGISGNWFDPW

SEQ ID NO: 50214 - protein, 18 aa, Homo sapiens
CAKDFLRLARYYYYMDVW

SEQ ID NO: 50215 - protein, 21 aa, Homo sapiens
CAAFYPEAAYYYDSSASGDYW

SEQ ID NO: 50216 - protein, 18 aa, Homo sapiens
CARVADDSTGHYPYFDYW

SEQ ID NO: 50217 - protein, 23 aa, Homo sapiens
CARLGQRSPDGVSPSYYYAMDVW

SEQ ID NO: 50218 - protein, 18 aa, Homo sapiens
CARGVDRWQQGGARFDPW

SEQ ID NO: 50219 - protein, 23 aa, Homo sapiens
CARHQGWPDTAMVTVDNGGFDYW

SEQ ID NO: 50220 - protein, 24 aa, Homo sapiens
CAKDRPESQYSSGWYYYYYYMDVW

SEQ ID NO: 50221 - protein, 21 aa, Homo sapiens
CTRDGSINYYGSGSYPNFDYW

SEQ ID NO: 50222 - protein, 17 aa, Homo sapiens
CAKELRITMVRGVWDYW

SEQ ID NO: 50223 - protein, 14 aa, Homo sapiens
CAREGHFGSWIDYW

SEQ ID NO: 50224 - protein, 21 aa, Homo sapiens
CARAAMVPLDPLDYYYGMDVW

SEQ ID NO: 50225 - protein, 17 aa, Homo sapiens
CAREYSSGWSNLNFDYW

SEQ ID NO: 50226 - protein, 16 aa, Homo sapiens
CVVYYYDSSNYYHDYW

SEQ ID NO: 50227 - protein, 22 aa, Homo sapiens
CAGGGWTTVTYRTHNVRYFDYW

SEQ ID NO: 50228 - protein, 19 aa, Homo sapiens
CAKDRPSTWDRDTSSVDYW

SEQ ID NO: 50229 - protein, 14 aa, Homo sapiens
CATPRKRDRAFDIW

SEQ ID NO: 50230 - protein, 18 aa, Homo sapiens
CARGESTIFGVVIPFDPW

SEQ ID NO: 50231 - protein, 27 aa, Homo sapiens
CARADTVTTHGSGKEVKYYYYYYMDVW

SEQ ID NO: 50232 - protein, 14 aa, Homo sapiens
CAAEVLRLDAFDIW

SEQ ID NO: 50233 - protein, 14 aa, Homo sapiens
CARSSAIGYSLDYW

SEQ ID NO: 50234 - protein, 15 aa, Homo sapiens
CARLRFLDSYYFDYW

SEQ ID NO: 50235 - protein, 17 aa, Homo sapiens
CAKDPDGYSSVEGFDYW

SEQ ID NO: 50236 - protein, 21 aa, Homo sapiens
CARGDHIAAPLHYYYYYMDVW

SEQ ID NO: 50237 - protein, 14 aa, Homo sapiens
CAKQLSLAAFFDHW

SEQ ID NO: 50238 - protein, 21 aa, Homo sapiens
CARRESSITIFGVVTRFFDYW

SEQ ID NO: 50239 - protein, 24 aa, Homo sapiens
CARERGVLVTGTTLNYYYYYMDVW

SEQ ID NO: 50240 - protein, 20 aa, Homo sapiens
CARQQRIVVVVPATRWFDPW

SEQ ID NO: 50241 - protein, 25 aa, Homo sapiens
CAHTGRISDYHFWSGYREYYYMDVW

SEQ ID NO: 50242 - protein, 15 aa, Homo sapiens
CTTDSSAYYFIPDYW

SEQ ID NO: 50243 - protein, 23 aa, Homo sapiens
CARVPFPYDFWSGYYYYYGMDVW

SEQ ID NO: 50244 - protein, 18 aa, Homo sapiens
CANQITIFGVAVIPFDYW

SEQ ID NO: 50245 - protein, 18 aa, Homo sapiens
CARGTHNTIQARYYFDYW

SEQ ID NO: 50246 - protein, 15 aa, Homo sapiens [sequence omitted]

SEQ ID NO: 50247 - protein, 20 aa, Homo sapiens
CATAPAYCSGGSCSNWFDPW

SEQ ID NO: 50248 - protein, 23 aa, Homo sapiens
CARHLTTFITMIVVVTQSWFDPW

SEQ ID NO: 50249 - protein, 17 aa, Homo sapiens
CARVEEMATINGYFDYW

SEQ ID NO: 50250 - protein, 24 aa, Homo sapiens
CAKCPFGMITFGGVIVFENYFDYW

SEQ ID NO: 50251 - protein, 21 aa, Homo sapiens
CASQYYDYVWGSYPALTFDYW

SEQ ID NO: 50252 - protein, 13 aa, Homo sapiens
CYSTDSSLNQRIF

SEQ ID NO: 50253 - protein, 21 aa, Homo sapiens
CARILYSGYHNYYFSYYMDVW

SEQ ID NO: 50254 - protein, 20 aa, Homo sapiens
CARGHDFWSGPRNYYYMDVW

SEQ ID NO: 50255 - protein, 22 aa, Homo sapiens
CARDRAAGVVGATLLLPLIDYW

SEQ ID NO: 50256 - protein, 22 aa, Homo sapiens
CASGAIFGVVIFDYYYYYMDVW

SEQ ID NO: 50257 - protein, 21 aa, Homo sapiens
CARHHRTIVLMVYAMGWFDPW

SEQ ID NO: 50258 - protein, 19 aa, Homo sapiens
CARGLEPYYYYYYYGMDVW

SEQ ID NO: 50259 - protein, 17 aa, Homo sapiens
CARALTGISHPYHFDYW

SEQ ID NO: 50260 - protein, 17 aa, Homo sapiens
CARTTSLGVMRAPFDLW

SEQ ID NO: 50261 - protein, 12 aa, Homo sapiens
CQQSFSTLAITF

SEQ ID NO: 50262 - protein, 19 aa, Homo sapiens
CARDFMTTEKVETVHFDYW

SEQ ID NO: 50263 - protein, 22 aa, Homo sapiens
CARACGSDCSSSYPFNWYFDLW

SEQ ID NO: 50264 - protein, 22 aa, Homo sapiens
CARVVVPAAIGPGPQALYFDYW

SEQ ID NO: 50265 - protein, 16 aa, Homo sapiens
CAHRRSGWYGPYFDYW

SEQ ID NO: 50266 - protein, 19 aa, Homo sapiens
CASGPVGATLYYYYGMDVW

SEQ ID NO: 50267 - protein, 18 aa, Homo sapiens
CAGAPEPIWHRGYYFEDW

SEQ ID NO: 50268 - protein, 22 aa, Homo sapiens
CARDRGNRKHCSGSTCYTMDYW

SEQ ID NO: 50269 - protein, 23 aa, Homo sapiens
CARGSGLNYYDSSGYYNWYFDLW

SEQ ID NO: 50270 - protein, 22 aa, Homo sapiens
CATIHLTATDRRGKGLKWFDPW

SEQ ID NO: 50271 - protein, 26 aa, Homo sapiens
CATAPPITMVRGVITKYYYYYGMDVW

SEQ ID NO: 50272 - protein, 18 aa, Homo sapiens
CARALRIAVADSGYFQHW

SEQ ID NO: 50273 - protein, 15 aa, Homo sapiens
CAKLVNDYGDPGDYW

SEQ ID NO: 50274 - protein, 17 aa, Homo sapiens
CAKDQIVLVVYAPFDYW

SEQ ID NO: 50275 - protein, 18 aa, Homo sapiens
CAKRRSSGWKTSGYFDYW

SEQ ID NO: 50276 - protein, 19 aa, Homo sapiens
CARDLAPYVAEPNWYFDLW

SEQ ID NO: 50277 - protein, 17 aa, Homo sapiens
CARSAPGADAGQASDYW

SEQ ID NO: 50278 - protein, 15 aa, Homo sapiens
CARDSGYAASYFDYW

SEQ ID NO: 50279 - protein, 17 aa, Homo sapiens
CARGDRVVVPAAPDDYW

SEQ ID NO: 50280 - protein, 24 aa, Homo sapiens
CARDRMITFGGVIADYYYYYMDVW

SEQ ID NO: 50281 - protein, 20 aa, Homo sapiens
CARGLVTWWQQLDPGAFDYW

SEQ ID NO: 50282 - protein, 20 aa, Homo sapiens
CARTQFTIFGVVEPFDFDYW

SEQ ID NO: 50283 - protein, 21 aa, Homo sapiens
CARTLDCTGVFLGVENWFDPW

SEQ ID NO: 50284 - protein, 18 aa, Homo sapiens
CAREEYSSSWSSGYMDVW

SEQ ID NO: 50285 - protein, 19 aa, Homo sapiens
CATFPRVDSSGWSQYNDYW

SEQ ID NO: 50286 - protein, 21 aa, Homo sapiens
CAKDANYSYGNYYYYYYMDVW

SEQ ID NO: 50287 - protein, 26 aa, Homo sapiens
CARAGNRIAARPLGLGFYYYYGMDVW

SEQ ID NO: 50288 - protein, 18 aa, Homo sapiens
CAKDQERRIAVAGGFDYW

SEQ ID NO: 50289 - protein, 20 aa, Homo sapiens
CAKDVYDSSGYGDVDAFDIW

SEQ ID NO: 50290 - protein, 17 aa, Homo sapiens
CARHISSGWLFDAFDIW

SEQ ID NO: 50291 - protein, 14 aa, Homo sapiens
CQSADTSANYHWVF

SEQ ID NO: 50292 - protein, 25 aa, Homo sapiens
CARVHQVPTDDFWSGVYYYYGMDVW

SEQ ID NO: 50293 - protein, 25 aa, Homo sapiens
CARHATQRHIVLVVYFGPGNYMDVW

SEQ ID NO: 50294 - protein, 19 aa, Homo sapiens
CAKDQPALYGDYDHYFDYW

SEQ ID NO: 50295 - protein, 16 aa, Homo sapiens
CARVRAITGSWYFDLW

SEQ ID NO: 50296 - protein, 18 aa, Homo sapiens
CARRQWGGPNIHDAFDIW

SEQ ID NO: 50297 - protein, 21 aa, Homo sapiens
CTRDPRRYDFWSGWTNWFDPW

SEQ ID NO: 50298 - protein, 20 aa, Homo sapiens
CARDRGYSSSWSTNYYMDVW

SEQ ID NO: 50299 - protein, 20 aa, Homo sapiens
CVREGDSFDSNGYYNWFDPW

SEQ ID NO: 50300 - protein, 14 aa, Homo sapiens
CASLGGNSWYFDLW

SEQ ID NO: 50301 - protein, 23 aa, Homo sapiens
CAKDLGSSWYGGRWDYYYGMDVW

SEQ ID NO: 50302 - protein, 20 aa, Homo sapiens
CAKAAHRLDTPMEDYYMDVW

SEQ ID NO: 50303 - protein, 17 aa, Homo sapiens
CARDAVLRYFDGYFDYW

SEQ ID NO: 50304 - protein, 20 aa, Homo sapiens
CARILIDCSGGSCHFLFDYW

SEQ ID NO: 50305 - protein, 15 aa, Homo sapiens
CVPLARGVDPELDYW

SEQ ID NO: 50306 - protein, 16 aa, Homo sapiens [sequence omitted]

SEQ ID NO: 50307 - protein, 21 aa, Homo sapiens
CAKDMKGGGILTGYYGILDYW

SEQ ID NO: 50308 - protein, 15 aa, Homo sapiens
CAHGVTVLGPAFDIW

SEQ ID NO: 50309 - protein, 16 aa, Homo sapiens
CAKPVGYYDHDGFDIW

SEQ ID NO: 50310 - protein, 27 aa, Homo sapiens
CARAQTTVTRRAQPYTRYYYYYYMDVW

SEQ ID NO: 50311 - protein, 20 aa, Homo sapiens
CAKSASDFEFWSGSCCHDYW

SEQ ID NO: 50312 - protein, 18 aa, Homo sapiens
CAKFTHDYHDYGGNSDYW

SEQ ID NO: 50313 - protein, 17 aa, Homo sapiens
CAKLKKEWVTTFLSDYW

SEQ ID NO: 50314 - protein, 27 aa, Homo sapiens
CARHSTALRFLEWLSDPYYYYYGMDVW

SEQ ID NO: 50315 - protein, 24 aa, Homo sapiens
CARDESGAIQLWFHDYYYYGMDVW

SEQ ID NO: 50316 - protein, 21 aa, Homo sapiens
CAREWDPLLWFGDPGDGMDVW

SEQ ID NO: 50317 - protein, 19 aa, Homo sapiens
CARDRGYSGYGSVGWFDPW

SEQ ID NO: 50318 - protein, 22 aa, Homo sapiens
CARDRGIHYCSSTSCQLPLDYW

SEQ ID NO: 50319 - protein, 25 aa, Homo sapiens
CARGCSGGSCSTFSLLYYYYYMDVW

SEQ ID NO: 50320 - protein, 25 aa, Homo sapiens
CARGVGCTNGVCYGFVKPHDAFDIW

SEQ ID NO: 50321 - protein, 25 aa, Homo sapiens
CAREKRGLLWFGELSRYYYYGMDVW

SEQ ID NO: 50322 - protein, 11 aa, Homo sapiens
CQQSYSISYNF

SEQ ID NO: 50323 - protein, 18 aa, Homo sapiens
CTRDANRVGGADGGFDYW

SEQ ID NO: 50324 - protein, 15 aa, Homo sapiens
CARPRSTWVGEIDYW

SEQ ID NO: 50325 - protein, 16 aa, Homo sapiens
CAAGQWSSGWTTLDYW

SEQ ID NO: 50326 - protein, 23 aa, Homo sapiens
CARDADDSSGYYPRYYYYGMDVW

SEQ ID NO: 50327 - protein, 19 aa, Homo sapiens
CTTDLSELRFLEWSPFDYW

SEQ ID NO: 50328 - protein, 21 aa, Homo sapiens
CARATGGWAGYNTLGDSLDYW

SEQ ID NO: 50329 - protein, 17 aa, Homo sapiens
CAREISSSWRLYYFDYW

SEQ ID NO: 50330 - protein, 25 aa, Homo sapiens
CARFLGVVVPVDIPETYYYYGMDVW

SEQ ID NO: 50331 - protein, 22 aa, Homo sapiens
CARGAGIFQNGRYSLFNWFGPW

SEQ ID NO: 50332 - protein, 15 aa, Homo sapiens
CARVRALWRDAFDIW

SEQ ID NO: 50333 - protein, 20 aa, Homo sapiens
CARGVQLWSDYYYYYYMDVW

SEQ ID NO: 50334 - protein, 16 aa, Homo sapiens
CARWNGGNSWGYFDLW

SEQ ID NO: 50335 - protein, 20 aa, Homo sapiens
CAHGIAAAGHVFGGDAFDIW

SEQ ID NO: 50336 - protein, 21 aa, Homo sapiens
CARDRRGSYFRSYYYYGMDVW

SEQ ID NO: 50337 - protein, 23 aa, Homo sapiens
CARAPTGQRGYSYGNSRWAFDIW

SEQ ID NO: 50338 - protein, 17 aa, Homo sapiens
CAREGPSGLRRFSFDYW

SEQ ID NO: 50339 - protein, 16 aa, Homo sapiens
CATGSPFAGSGWFDPW

SEQ ID NO: 50340 - protein, 11 aa, Homo sapiens
CAKEVPSFDLW

SEQ ID NO: 50341 - protein, 18 aa, Homo sapiens
CAHNRIDEYHSQQAFDIW

SEQ ID NO: 50342 - protein, 25 aa, Homo sapiens
CARLPCPAVTTFFSSGYYYYGMDVW

SEQ ID NO: 50343 - protein, 17 aa, Homo sapiens
CATDIRYNWNYFWFDPW

SEQ ID NO: 50344 - protein, 15 aa, Homo sapiens
CRLDSSGWNDAFDIW

SEQ ID NO: 50345 - protein, 22 aa, Homo sapiens
CAREWGYCSSTSCYGFDGMDVW

SEQ ID NO: 50346 - protein, 21 aa, Homo sapiens
CARDGITIFGVENYYYGMDVW

SEQ ID NO: 50347 - protein, 16 aa, Homo sapiens
CAKDVDAETYGVFDLW

SEQ ID NO: 50348 - protein, 19 aa, Homo sapiens
CAKSAYYYGSGQSSPFDYW

SEQ ID NO: 50349 - protein, 21 aa, Homo sapiens
CAKDGPLDHETSAYYSGFDSW

SEQ ID NO: 50350 - protein, 25 aa, Homo sapiens
CARDQWVYDFWSGYYNYYYYYMDVW

SEQ ID NO: 50351 - protein, 13 aa, Homo sapiens
CATVVITVNFDYW

SEQ ID NO: 50352 - protein, 23 aa, Homo sapiens
CARRPPSWIQLWGTIYYYGMDVW

SEQ ID NO: 50353 - protein, 24 aa, Homo sapiens
CAKERGDPNNWNDDYYYYYGMDVW

SEQ ID NO: 50354 - protein, 17 aa, Homo sapiens
CAKAQISNSWPRIFDYW

SEQ ID NO: 50355 - protein, 20 aa, Homo sapiens
CAKDMWIQLWLQPQDAFDIW

SEQ ID NO: 50356 - protein, 25 aa, Homo sapiens
CARESLGYCSSTSCYAEPPGGFDPW

SEQ ID NO: 50357 - protein, 23 aa, Homo sapiens
CATQGWDCSGSGCGYYYYYMGVW

SEQ ID NO: 50358 - protein, 20 aa, Homo sapiens
CAKRKGANYDFWSGYYFDFW

SEQ ID NO: 50359 - protein, 13 aa, Homo sapiens
CSRRRGSAEFDYW

SEQ ID NO: 50360 - protein, 18 aa, Homo sapiens
CARGLGIYGDYFYAFDMW

SEQ ID NO: 50361 - protein, 21 aa, Homo sapiens
CAKDSGIGGDLQLGPNWFDPW

SEQ ID NO: 50362 - protein, 18 aa, Homo sapiens
CAKVKDDSDLFMRYFDYW

SEQ ID NO: 50363 - protein, 17 aa, Homo sapiens
CARDPSSFSPYYYMDVW

SEQ ID NO: 50364 - protein, 20 aa, Homo sapiens
CARHPNDILTGYYRGYFDYW

SEQ ID NO: 50365 - protein, 16 aa, Homo sapiens
CVRFYYGDYLLYFDSW

SEQ ID NO: 50366 - protein, 20 aa, Homo sapiens
CVKDLDFGSGSYNDVAFEYW

SEQ ID NO: 50367 - protein, 18 aa, Homo sapiens
CVKDRNSYYYASGSFDYW

SEQ ID NO: 50368 - protein, 21 aa, Homo sapiens
CARYSYNPQNSYVGSGGMDYW

SEQ ID NO: 50369 - protein, 18 aa, Homo sapiens
CARSPGYSYGYRYGMDVW

SEQ ID NO: 50370 - protein, 24 aa, Homo sapiens
CARGPVGYYDSSGYYYGHYYFDYW

SEQ ID NO: 50371 - protein, 14 aa, Homo sapiens
CLLYYGGAQAFYVF

SEQ ID NO: 50372 - protein, 21 aa, Homo sapiens
CAKEAYSVQLIVVVPAGLDYW

SEQ ID NO: 50373 - protein, 12 aa, Homo sapiens
CQQSFSLSLKAF

SEQ ID NO: 50374 - protein, 16 aa, Homo sapiens
CARDGRFGESYPLDYW

SEQ ID NO: 50375 - protein, 23 aa, Homo sapiens
CARDSRRTIFGVVIVQYNWFDPW

SEQ ID NO: 50376 - protein, 20 aa, Homo sapiens
CARERTVTKFFYYYYYMDVW

SEQ ID NO: 50377 - protein, 19 aa, Homo sapiens
CASETVKWELPQFDAFDIW

SEQ ID NO: 50378 - protein, 18 aa, Homo sapiens
CARVDYSGSGNPGGFDNW

SEQ ID NO: 50379 - protein, 18 aa, Homo sapiens
CARARDKGYSSSSFFDYW

SEQ ID NO: 50380 - protein, 19 aa, Homo sapiens
CARPMYCSGGDCLDAFDIW

SEQ ID NO: 50381 - protein, 22 aa, Homo sapiens
CARLEPNYYDSSGLTGGWFDPW

SEQ ID NO: 50382 - protein, 16 aa, Homo sapiens
CARDMGGDIYGAFDFW

SEQ ID NO: 50383 - protein, 17 aa, Homo sapiens
CAHRPGILGSPFYFDYW

SEQ ID NO: 50384 - protein, 25 aa, Homo sapiens
CAKDREGKYSYENAYYYYYYGMDVW

SEQ ID NO: 50385 - protein, 20 aa, Homo sapiens
CARDNHYDGSGHPHDGFDIW

SEQ ID NO: 50386 - protein, 19 aa, Homo sapiens
CARTYYYDTSEYYYGFDYW

SEQ ID NO: 50387 - protein, 20 aa, Homo sapiens
CARHRQEWLGGGDLNWFDPW

SEQ ID NO: 50388 - protein, 20 aa, Homo sapiens
CARGHSDILTGPYYYYMDVW

SEQ ID NO: 50389 - protein, 25 aa, Homo sapiens
CTRDRNRGYYDSSGYYFEDYYPGYW

SEQ ID NO: 50390 - protein, 12 aa, Homo sapiens
CQQTYSTPTLIF

SEQ ID NO: 50391 - protein, 21 aa, Homo sapiens
CARHQGKMVVVVAAPYYFDYW

SEQ ID NO: 50392 - protein, 21 aa, Homo sapiens
CARRSHYYDNNAYPIDAFDLW

SEQ ID NO: 50393 - protein, 22 aa, Homo sapiens
CARHPNPNSSGWYTGFKWFDYW

SEQ ID NO: 50394 - protein, 23 aa, Homo sapiens
CAKDLGAFITMIVVVISPTFDYW

SEQ ID NO: 50395 - protein, 17 aa, Homo sapiens
CTRDYYDSSGYRGDDYW

SEQ ID NO: 50396 - protein, 13 aa, Homo sapiens
CAHRWSLSPFDPW

SEQ ID NO: 50397 - protein, 15 aa, Homo sapiens
CALITGRYPDAFDIW

SEQ ID NO: 50398 - protein, 17 aa, Homo sapiens
CALPISRDYGDFYFDYW

SEQ ID NO: 50399 - protein, 19 aa, Homo sapiens
CTTAAGVRFLEWLTDLDYW

SEQ ID NO: 50400 - protein, 21 aa, Homo sapiens
CARGRSIRRFWSGYEYWFDPW

SEQ ID NO: 50401 - protein, 29 aa, Homo sapiens
CAKDHRYYDFWSGYAPRNYYYYYYYMDVW

SEQ ID NO: 50402 - protein, 18 aa, Homo sapiens
CAKDIGPYSSPVSYFDYW

SEQ ID NO: 50403 - protein, 19 aa, Homo sapiens
CARDFVGSSGWWNDAFDIW

SEQ ID NO: 50404 - protein, 21 aa, Homo sapiens
CARDSISVGDNYYYYYYMDVW

SEQ ID NO: 50405 - protein, 20 aa, Homo sapiens
CARHGGSSGWHLGTFYFDYW

SEQ ID NO: 50406 - protein, 16 aa, Homo sapiens
CARHYGTFYTGSFDLW

SEQ ID NO: 50407 - protein, 12 aa, Homo sapiens
CVGQPVHAFDFW

SEQ ID NO: 50408 - protein, 17 aa, Homo sapiens
CAKVGVSVYSSGQQDYW

SEQ ID NO: 50409 - protein, 16 aa, Homo sapiens
CARGAYNSGWRDIDYW

SEQ ID NO: 50410 - protein, 18 aa, Homo sapiens
CARVRAALDYYYYYMDAW

SEQ ID NO: 50411 - protein, 25 aa, Homo sapiens
CARCARDYYSGNYYEKSGFYYFDYW

SEQ ID NO: 50412 - protein, 22 aa, Homo sapiens
CARGVRERITMIVVVMGAMDVW

SEQ ID NO: 50413 - protein, 20 aa, Homo sapiens
CAAGFRGYCDRSGCYNRDYW

SEQ ID NO: 50414 - protein, 18 aa, Homo sapiens
CAREYSIATTGTGELDYW

SEQ ID NO: 50415 - protein, 14 aa, Homo sapiens
CARPSPSKDAFDIW

SEQ ID NO: 50416 - protein, 23 aa, Homo sapiens
CAKVKESTTIFGVVILYWYFDLW

SEQ ID NO: 50417 - protein, 20 aa, Homo sapiens
CARDQWLLCDYYYYYYMDVW

SEQ ID NO: 50418 - protein, 16 aa, Homo sapiens
CARGLDYYDSSAIDYW

SEQ ID NO: 50419 - protein, 19 aa, Homo sapiens
CAREVGVDYLYYYYGMDVW

SEQ ID NO: 50420 - protein, 13 aa, Homo sapiens
CAKESSVGYFDYW

SEQ ID NO: 50421 - protein, 23 aa, Homo sapiens
CARDMKKSRYYDSSGYDQAFDIW

SEQ ID NO: 50422 - protein, 21 aa, Homo sapiens
CARENLAVTIFGVVKGYFDYW

SEQ ID NO: 50423 - protein, 24 aa, Homo sapiens
CAREQESRDFWSGYYKLSGDFDYW

SEQ ID NO: 50424 - protein, 20 aa, Homo sapiens
CAVKHSAYDSPYYYYGMDVW

SEQ ID NO: 50425 - protein, 19 aa, Homo sapiens
CARDRFPAGLAVAAPDDYW

SEQ ID NO: 50426 - protein, 21 aa, Homo sapiens
CARETSPGDFWSGYGRYFDYW

SEQ ID NO: 50427 - protein, 16 aa, Homo sapiens
CARRAAAGIGLYFDYW

SEQ ID NO: 50428 - protein, 20 aa, Homo sapiens
CARPHPSIAVAGPMYYFDYW

SEQ ID NO: 50429 - protein, 22 aa, Homo sapiens
CASNSRAGYCSPSSCPGAFDIW

SEQ ID NO: 50430 - protein, 19 aa, Homo sapiens
CAKSPTAYYSSGWYGIDYW

SEQ ID NO: 50431 - protein, 17 aa, Homo sapiens
CAKAPGGSPEDDAFHIW

SEQ ID NO: 50432 - protein, 24 aa, Homo sapiens
CARDYSPWYYDILTGYYHDAFDIW

SEQ ID NO: 50433 - protein, 19 aa, Homo sapiens
CARDKRTDFWSGYSTCDYW

SEQ ID NO: 50434 - protein, 21 aa, Homo sapiens
CAKARIDYGRYVGYYYYMDVW

SEQ ID NO: 50435 - protein, 25 aa, Homo sapiens
CARTALWIAAAGTTKYYYYYYMDVW

SEQ ID NO: 50436 - protein, 16 aa, Homo sapiens
CARSHYDFWSGYCDYW

SEQ ID NO: 50437 - protein, 17 aa, Homo sapiens
CARDMKVGDFGDGMDVW

SEQ ID NO: 50438 - protein, 21 aa, Homo sapiens
CARDGGQGASNYHVYWYLDLW

SEQ ID NO: 50439 - protein, 30 aa, Homo sapiens
CTRHLDIRTLFGVVIMASDGTNYYYGMDVW

SEQ ID NO: 50440 - protein, 25 aa, Homo sapiens
CAKVTVVVVAATLLWATKPSYFDYW

SEQ ID NO: 50441 - protein, 22 aa, Homo sapiens
CAHRGQLFYYGSGNYYNVFDYW

SEQ ID NO: 50442 - protein, 17 aa, Homo sapiens
CARTEYSSSWYGRYDYW

SEQ ID NO: 50443 - protein, 21 aa, Homo sapiens
CARDRRQWLIKGYYYYGMDVW

SEQ ID NO: 50444 - protein, 21 aa, Homo sapiens
CIGSTIYCNSTSCYTWGFDYW

SEQ ID NO: 50445 - protein, 20 aa, Homo sapiens
CASRVLTGTTVHYYYYMDVW

SEQ ID NO: 50446 - protein, 16 aa, Homo sapiens
CARGSRVGPTGVLDYW

SEQ ID NO: 50447 - protein, 19 aa, Homo sapiens
CARTLYCTNGVCYWGVDYW

SEQ ID NO: 50448 - protein, 17 aa, Homo sapiens
CAHHVDTAMVANWFDPW

SEQ ID NO: 50449 - protein, 20 aa, Homo sapiens
CARDSRAIFGVVIISPPDYW

SEQ ID NO: 50450 - protein, 18 aa, Homo sapiens
CARGDADYVWGSYHFDYW

SEQ ID NO: 50451 - protein, 18 aa, Homo sapiens
CAKFPDYYYGSGDSFDIW

SEQ ID NO: 50452 - protein, 23 aa, Homo sapiens
CARGDYYGPKQSYYYYYYYMDVW

SEQ ID NO: 50453 - protein, 16 aa, Homo sapiens
CAKMHILTGYNWVDPW

SEQ ID NO: 50454 - protein, 19 aa, Homo sapiens
CARDGGSYNPHYYYGMDVW

SEQ ID NO: 50455 - protein, 12 aa, Homo sapiens
CQQSHSAPPITF

SEQ ID NO: 50456 - protein, 17 aa, Homo sapiens
CARDIRFIAAPEEADYW

SEQ ID NO: 50457 - protein, 15 aa, Homo sapiens
CAKDRGGGSHYFDYW

SEQ ID NO: 50458 - protein, 15 aa, Homo sapiens
CARDGGNSGYYFDLW

SEQ ID NO: 50459 - protein, 18 aa, Homo sapiens
CARDPSFQLALGYYFDSW

SEQ ID NO: 50460 - protein, 16 aa, Homo sapiens
CTRGRHNFNYGLFDSW

SEQ ID NO: 50461 - protein, 22 aa, Homo sapiens
CAREYCSGGSCYGRPTAHFDYW

SEQ ID NO: 50462 - protein, 21 aa, Homo sapiens
CARSFIVVVPATIYYYGMDVW

SEQ ID NO: 50463 - protein, 18 aa, Homo sapiens
CARASYDSSGYYNWFDPW

SEQ ID NO: 50464 - protein, 21 aa, Homo sapiens
CARWGGDGDFFDRGERLFDSW

SEQ ID NO: 50465 - protein, 19 aa, Homo sapiens
CARGYYDSSGFMNYYFDYW

SEQ ID NO: 50466 - protein, 20 aa, Homo sapiens
CARSRQLVPGLYYYYYMDVW

SEQ ID NO: 50467 - protein, 20 aa, Homo sapiens
CARYDFWSGLGVVSRAFDIW

SEQ ID NO: 50468 - protein, 21 aa, Homo sapiens
CARGQRTTIFGVVILNWFDPW

SEQ ID NO: 50469 - protein, 20 aa, Homo sapiens
CTTDRDYDYVWGSYRYPDYW

SEQ ID NO: 50470 - protein, 21 aa, Homo sapiens
CAKFRSPSGYGDYDRGTIDYW

SEQ ID NO: 50471 - protein, 24 aa, Homo sapiens
CATHTPYCTNGVCQSDYYYGMDVW

SEQ ID NO: 50472 - protein, 16 aa, Homo sapiens
CAHRQAGIAVGLFDYW

SEQ ID NO: 50473 - protein, 11 aa, Homo sapiens
CLQDYTSQWTF

SEQ ID NO: 50474 - protein, 25 aa, Homo sapiens
CARGLVQVVAATLWIKTRSYYMDVW

SEQ ID NO: 50475 - protein, 20 aa, Homo sapiens
CVKSYDSSGFYYPWGYFNSW

SEQ ID NO: 50476 - protein, 17 aa, Homo sapiens
CARGSVSSSWKYYFDYW

SEQ ID NO: 50477 - protein, 16 aa, Homo sapiens
CAKHDYGGNSFPFDYW

SEQ ID NO: 50478 - protein, 19 aa, Homo sapiens
CARLRDSRYYYNYYYMDVW

SEQ ID NO: 50479 - protein, 16 aa, Homo sapiens
CAREGRITGTTGFDYW

SEQ ID NO: 50480 - protein, 21 aa, Homo sapiens
CAKGQAATGQIDYYYYGMDVW

SEQ ID NO: 50481 - protein, 14 aa, Homo sapiens
CARDSSTWHNIDYW

SEQ ID NO: 50482 - protein, 22 aa, Homo sapiens
CATAPPRYGDYGNYYYYYMDVW

SEQ ID NO: 50483 - protein, 25 aa, Homo sapiens
CAREGYDFWSGYYDVHGTTHWFDPW

SEQ ID NO: 50484 - protein, 20 aa, Homo sapiens
CARVPQQWLANYYYYYMDVW

SEQ ID NO: 50485 - protein, 13 aa, Homo sapiens
CTRAERYYYMDVW

SEQ ID NO: 50486 - protein, 16 aa, Homo sapiens
CATSPSSGSYQPFDYW

SEQ ID NO: 50487 - protein, 21 aa, Homo sapiens
CARGASLVRGVIYYYYGMDVW

SEQ ID NO: 50488 - protein, 27 aa, Homo sapiens
CARDRWVTIFGVVIIPTPDYYYGMDVW

SEQ ID NO: 50489 - protein, 19 aa, Homo sapiens
CARDAGASNYYFYYGMDVW

SEQ ID NO: 50490 - protein, 13 aa, Homo sapiens
CTSLYGGNSGDYW

SEQ ID NO: 50491 - protein, 22 aa, Homo sapiens
CARIASVVATKGGMQNWYFDLW

SEQ ID NO: 50492 - protein, 21 aa, Homo sapiens
CARSKTWAYSSSWTPRGFDIW

SEQ ID NO: 50493 - protein, 13 aa, Homo sapiens
CARLTPWLYFDSW

SEQ ID NO: 50494 - protein, 16 aa, Homo sapiens
CAKDSVAKLPYYFDYW

SEQ ID NO: 50495 - protein, 25 aa, Homo sapiens
CTRDWRYSGYDWGWELYYYYGMDVW

SEQ ID NO: 50496 - protein, 19 aa, Homo sapiens
CAKADGPFYSSSWYSVDYW

SEQ ID NO: 50497 - protein, 15 aa, Homo sapiens
CARSKWSKTWYFDLW

SEQ ID NO: 50498 - protein, 17 aa, Homo sapiens
CATIWGMINSGSYFDYW

SEQ ID NO: 50499 - protein, 18 aa, Homo sapiens
CARDGGMGSSGWYPFEYW

SEQ ID NO: 50500 - protein, 30 aa, Homo sapiens
CARKTRRSSYYDFWSGYYPPDYYYYGMDVW

SEQ ID NO: 50501 - protein, 15 aa, Homo sapiens
CAKGRSAVLDAFNFW

SEQ ID NO: 50502 - protein, 19 aa, Homo sapiens
CARDIPWGVVAATDAFDIW

SEQ ID NO: 50503 - protein, 23 aa, Homo sapiens
CVRRNTQTNYYEYSSHNDWFDPW

SEQ ID NO: 50504 - protein, 16 aa, Homo sapiens
CAKDQVGATRDAFDIW

SEQ ID NO: 50505 - protein, 23 aa, Homo sapiens
CAKDKEENYDDSGYYFADAFDLW

SEQ ID NO: 50506 - protein, 16 aa, Homo sapiens
CAKGSRGDWSWSVDYW

SEQ ID NO: 50507 - protein, 23 aa, Homo sapiens
CATVGALGYCSGGSCYSSYFDYW

SEQ ID NO: 50508 - protein, 23 aa, Homo sapiens
CARDGTPLKSFTMIHGNNWFDPW

SEQ ID NO: 50509 - protein, 29 aa, Homo sapiens
CAKELNYYDFWSGYSTIRDYYYYYGMDVW

SEQ ID NO: 50510 - protein, 19 aa, Homo sapiens
CAKGEYYDILTGYYGFDYW

SEQ ID NO: 50511 - protein, 25 aa, Homo sapiens
CARVRYYDFWSGYRGYYYYYYMDVW

SEQ ID NO: 50512 - protein, 20 aa, Homo sapiens
CARFTEGIRYFDWLFYFDYW

SEQ ID NO: 50513 - protein, 20 aa, Homo sapiens
CATVGDFWSGINQLDAFDIW

SEQ ID NO: 50514 - protein, 22 aa, Homo sapiens
CARDLSPYYGFWSGLTDGMDVW

SEQ ID NO: 50515 - protein, 12 aa, Homo sapiens
CAPFGIRGFDPW

SEQ ID NO: 50516 - protein, 16 aa, Homo sapiens
CAKNPHSSSYSYFDYW

SEQ ID NO: 50517 - protein, 17 aa, Homo sapiens
CASWFIAVAGPYYFDYW

SEQ ID NO: 50518 - protein, 21 aa, Homo sapiens
CAKDSGIFGVVIMRLYYFDYW

SEQ ID NO: 50519 - protein, 15 aa, Homo sapiens
CVREAATVTVTLDYW

SEQ ID NO: 50520 - protein, 18 aa, Homo sapiens
CARFQYQLLFWDNWFDPW

SEQ ID NO: 50521 - protein, 20 aa, Homo sapiens
CASAKQASSSWSYYYYMDVW

SEQ ID NO: 50522 - protein, 20 aa, Homo sapiens
CAKDANEIWSGWPGDPFDIW

SEQ ID NO: 50523 - protein, 21 aa, Homo sapiens
CARDSHEDHDNGGYHYYFDYW

SEQ ID NO: 50524 - protein, 17 aa, Homo sapiens
CAKAGSTGWTTWSFDLW

SEQ ID NO: 50525 - protein, 23 aa, Homo sapiens
CAMGIAAAGTLSIEPLQDWFDPW

SEQ ID NO: 50526 - protein, 18 aa, Homo sapiens
CARVDNVSSGWFQPFDYW

SEQ ID NO: 50527 - protein, 15 aa, Homo sapiens
CTTQGYYYDSSDDYW

SEQ ID NO: 50528 - protein, 17 aa, Homo sapiens
CARGSSGWYGEEYFQHW

SEQ ID NO: 50529 - protein, 21 aa, Homo sapiens
CAREAGTTLGPSYYYYYMDVW

SEQ ID NO: 50530 - protein, 19 aa, Homo sapiens
CARTYYDILTGLLDAFDIW

SEQ ID NO: 50531 - protein, 21 aa, Homo sapiens
CARVGYSSSWSTYHYWYFDLW

SEQ ID NO: 50532 - protein, 15 aa, Homo sapiens
CARGEEAVRPHFEYW

SEQ ID NO: 50533 - protein, 19 aa, Homo sapiens
CASSAQGYDFWSGYRIDYW

SEQ ID NO: 50534 - protein, 23 aa, Homo sapiens
CARVYCSGPTCFLTVGKSNFDFW

SEQ ID NO: 50535 - protein, 16 aa, Homo sapiens
CARGRWGYSYGDFDYW

SEQ ID NO: 50536 - protein, 25 aa, Homo sapiens
CARPSRYYDILTGYSTYYYYGMDVW

SEQ ID NO: 50537 - protein, 20 aa, Homo sapiens
CAKILSSYYYDSVPDAFDIW

SEQ ID NO: 50538 - protein, 25 aa, Homo sapiens
CARHPYYYDTTGYYGGEQYTWFDAW

SEQ ID NO: 50539 - protein, 22 aa, Homo sapiens
CARNPFQITIFGVVTRPGFDYW

SEQ ID NO: 50540 - protein, 17 aa, Homo sapiens
CARVDFGGGAGSSFDYW

SEQ ID NO: 50541 - protein, 15 aa, Homo sapiens
CARDQLNLGWFADYW

SEQ ID NO: 50542 - protein, 16 aa, Homo sapiens
CAKGPHWVVGATSDYW

SEQ ID NO: 50543 - protein, 17 aa, Homo sapiens
CARDLPAAISTGWFDPW

SEQ ID NO: 50544 - protein, 16 aa, Homo sapiens
CAKPRTMIVVQGFDYW

SEQ ID NO: 50545 - protein, 20 aa, Homo sapiens
CAGEAVWRKNYYYYYGMDVW

SEQ ID NO: 50546 - protein, 20 aa, Homo sapiens
CARDRYCSGGSCYGGWFDPW

SEQ ID NO: 50547 - protein, 16 aa, Homo sapiens
CARARRLGATYYFDYW

SEQ ID NO: 50548 - protein, 22 aa, Homo sapiens
CARHYVGDYDNTGHSDWYFDFW

SEQ ID NO: 50549 - protein, 14 aa, Homo sapiens
CASAQWLLGAFDIW

SEQ ID NO: 50550 - protein, 18 aa, Homo sapiens
CASPHSTVVTAEYYFDHW

SEQ ID NO: 50551 - protein, 17 aa, Homo sapiens
CARGAVAGTYYYYMDVW

SEQ ID NO: 50552 - protein, 22 aa, Homo sapiens
CASAGGTVTSSGAYYYFYMDVW

SEQ ID NO: 50553 - protein, 19 aa, Homo sapiens
CAKRKSTSMVVTALAFDIW

SEQ ID NO: 50554 - protein, 22 aa, Homo sapiens
CARATLEELLGVFGVVDAFDIW

SEQ ID NO: 50555 - protein, 19 aa, Homo sapiens
CARSTRGTVTTRPTGVDYW

SEQ ID NO: 50556 - protein, 16 aa, Homo sapiens
CARAVKGSYQRGIDYW

SEQ ID NO: 50557 - protein, 22 aa, Homo sapiens
CARDREYGDYTGRGVGPIFDPW

SEQ ID NO: 50558 - protein, 22 aa, Homo sapiens
CARHESHLGLATRRQVWGFDPW

SEQ ID NO: 50559 - protein, 21 aa, Homo sapiens
CARMMCSGGGCYSLANWFDPW

SEQ ID NO: 50560 - protein, 25 aa, Homo sapiens
CARAVTTHDFWSGYSLYYYYYMDVW

SEQ ID NO: 50561 - protein, 16 aa, Homo sapiens
CATDYYDSSGYYSGYW

SEQ ID NO: 50562 - protein, 21 aa, Homo sapiens
CARVWNYYDSSGYWSGALDYW

SEQ ID NO: 50563 - protein, 23 aa, Homo sapiens
CARGGKESTYTPGYYYYFGMDVW

SEQ ID NO: 50564 - protein, 16 aa, Homo sapiens
CARVGALEWELEVDYW

SEQ ID NO: 50565 - protein, 15 aa, Homo sapiens
CARERQWPDQHFDYW

SEQ ID NO: 50566 - protein, 15 aa, Homo sapiens
CARGGRDGSRVNDYW

SEQ ID NO: 50567 - protein, 18 aa, Homo sapiens
CARFRGFGWIQLSLFDYW

SEQ ID NO: 50568 - protein, 26 aa, Homo sapiens
CARAYYDSSGYYYGHGVYYYYGMDVW

SEQ ID NO: 50569 - protein, 17 aa, Homo sapiens
CARHFTTYSHPYYLDNW

SEQ ID NO: 50570 - protein, 19 aa, Homo sapiens
CARVKWLQFVDYYYGMDVW

SEQ ID NO: 50571 - protein, 27 aa, Homo sapiens
CARDRRDPLLWFGELLYYYYYYGMDVW

SEQ ID NO: 50572 - protein, 15 aa, Homo sapiens
CATASLLTGYYFNSW

SEQ ID NO: 50573 - protein, 15 aa, Homo sapiens
CARDGDYGGNFPDSW

SEQ ID NO: 50574 - protein, 25 aa, Homo sapiens
CARHRAGFLEWLLYSLSSPSWFDPW

SEQ ID NO: 50575 - protein, 22 aa, Homo sapiens
CTTDQGDSSGYFGGYYYYMDVW

SEQ ID NO: 50576 - protein, 24 aa, Homo sapiens
CARYVMTSLGGVMAVEAVHSFDFW

SEQ ID NO: 50577 - protein, 20 aa, Homo sapiens
CARAYGIAAHHYYYYYMDVW

SEQ ID NO: 50578 - protein, 14 aa, Homo sapiens
CARDGLSFRIVDYW

SEQ ID NO: 50579 - protein, 21 aa, Homo sapiens
CARESPEIVMVVVANDAFDIW

SEQ ID NO: 50580 - protein, 14 aa, Homo sapiens
CQSSDNSGSFDVVF

SEQ ID NO: 50581 - protein, 12 aa, Homo sapiens
CTTSFGEDRDYW

SEQ ID NO: 50582 - protein, 18 aa, Homo sapiens
CARDPSGAFGSSSHFDYW

SEQ ID NO: 50583 - protein, 15 aa, Homo sapiens
CARQKQTYLDALDLW

SEQ ID NO: 50584 - protein, 22 aa, Homo sapiens
CAKDPHNYDYVWGSSSDAFDIW

SEQ ID NO: 50585 - protein, 24 aa, Homo sapiens
CAKDRFGGVVGATTILRIGYFDYW

SEQ ID NO: 50586 - protein, 12 aa, Homo sapiens
CSSPTSSTTLSF

SEQ ID NO: 50587 - protein, 15 aa, Homo sapiens
CVRDGGYNGPDLDYW

SEQ ID NO: 50588 - protein, 20 aa, Homo sapiens
CTRMVGGDILTGYLGDFDYW

SEQ ID NO: 50589 - protein, 19 aa, Homo sapiens
CARNVVVVAARASWYFDLW

SEQ ID NO: 50590 - protein, 23 aa, Homo sapiens
CAKVKARGVVVVPAATPDAFDIW

SEQ ID NO: 50591 - protein, 18 aa, Homo sapiens
CAKGTTSVVPAVTYHDYW

SEQ ID NO: 50592 - protein, 17 aa, Homo sapiens
CARAPDGVRRYWYFDLW

SEQ ID NO: 50593 - protein, 18 aa, Homo sapiens
CARLSRDGHNGPPYFDYW

SEQ ID NO: 50594 - protein, 21 aa, Homo sapiens
CARGGTHTGYSSSWYGIFDYW

SEQ ID NO: 50595 - protein, 23 aa, Homo sapiens
CARLGLLGLWFGELLPDNWFDPW

SEQ ID NO: 50596 - protein, 17 aa, Homo sapiens
CARGIDIFGVVITHDYW

SEQ ID NO: 50597 - protein, 16 aa, Homo sapiens
CARHGLAVVGAKFDPW

SEQ ID NO: 50598 - protein, 19 aa, Homo sapiens
CARESPSGDYYRNEAFDVW

SEQ ID NO: 50599 - protein, 13 aa, Homo sapiens
CHQYGSSPPEYSF

SEQ ID NO: 50600 - protein, 27 aa, Homo sapiens
CARVTSPGSEGIMITFGGVIGAPVDYW

SEQ ID NO: 50601 - protein, 19 aa, Homo sapiens
CTGGVCLRDDYYYYYMDVW

SEQ ID NO: 50602 - protein, 23 aa, Homo sapiens
CARRLGAHYDILTGYYPYYFDYW

SEQ ID NO: 50603 - protein, 19 aa, Homo sapiens
CARPATEWELLNRHPIDYW

SEQ ID NO: 50604 - protein, 22 aa, Homo sapiens
CARSYYDFWSGYYSRMDAFDIW

SEQ ID NO: 50605 - protein, 23 aa, Homo sapiens
CARERYYYDSSGYASHPYYFDYW

SEQ ID NO: 50606 - protein, 19 aa, Homo sapiens
CATDRLRFLEWPSHAFDIW

SEQ ID NO: 50607 - protein, 16 aa, Homo sapiens
CARDNGIAVTGEFDYW

SEQ ID NO: 50608 - protein, 18 aa, Homo sapiens
CTTENSFFWSGYYNFDYW

SEQ ID NO: 50609 - protein, 13 aa, Homo sapiens
CAFSLAPDGMDVW

SEQ ID NO: 50610 - protein, 21 aa, Homo sapiens
CARAGYSYGYSYLGYYGMDVW

SEQ ID NO: 50611 - protein, 20 aa, Homo sapiens
CARGNTMVRGVKYYYYMDVW

SEQ ID NO: 50612 - protein, 16 aa, Homo sapiens [sequence omitted]

SEQ ID NO: 50613 - protein, 21 aa, Homo sapiens
CAKDPYDYVWGGHRYNYFDSW

SEQ ID NO: 50614 - protein, 23 aa, Homo sapiens
CARGENFWSGYITPSYYYGMDVW

SEQ ID NO: 50615 - protein, 12 aa, Homo sapiens
CARGDAEYFQYW

SEQ ID NO: 50616 - protein, 20 aa, Homo sapiens
CAKLFTSYFDSSTYHLSDYW

SEQ ID NO: 50617 - protein, 23 aa, Homo sapiens
CARRRLTSITIFGVVTPNWFDPW

SEQ ID NO: 50618 - protein, 16 aa, Homo sapiens
CARETSDYTSSWFDYW

SEQ ID NO: 50619 - protein, 17 aa, Homo sapiens
CARDMPFGETTVRADYW

SEQ ID NO: 50620 - protein, 24 aa, Homo sapiens
CARGPLTTKTIFGVVITYWYFDLW

SEQ ID NO: 50621 - protein, 22 aa, Homo sapiens
CAREDRITIFGVTIGGVAFDIW

SEQ ID NO: 50622 - protein, 22 aa, Homo sapiens
CARVKRECSGGGCHKFNWFDPW

SEQ ID NO: 50623 - protein, 26 aa, Homo sapiens
CARDISGYDGAGQWLVPALGFNFDYW

SEQ ID NO: 50624 - protein, 15 aa, Homo sapiens
CARGAISMIVVVDYW

SEQ ID NO: 50625 - protein, 19 aa, Homo sapiens
CAKDRGYWDHDSSGYPDYW

SEQ ID NO: 50626 - protein, 19 aa, Homo sapiens
CARDLGDDSGDLRWAFDSW

SEQ ID NO: 50627 - protein, 16 aa, Homo sapiens
CARKYSRGFGPPFDPW

SEQ ID NO: 50628 - protein, 24 aa, Homo sapiens
CAKDAGQPYYDFWSAIMGAHFDYW

SEQ ID NO: 50629 - protein, 28 aa, Homo sapiens
CARGRKWFGELLYFSGGRDYYYYGMDVW

SEQ ID NO: 50630 - protein, 14 aa, Homo sapiens
CTGGGYYSWAWDYW

SEQ ID NO: 50631 - protein, 15 aa, Homo sapiens
CARPVEMATLPPDYW

SEQ ID NO: 50632 - protein, 17 aa, Homo sapiens
CAKDPTQWLATNAFDIW

SEQ ID NO: 50633 - protein, 33 aa, Homo sapiens
CARAWGPYYGDYLVAQAARPLLEYKRNWYFDLW

SEQ ID NO: 50634 - protein, 17 aa, Homo sapiens
CARVTHSSSWFWYFDLW

SEQ ID NO: 50635 - protein, 21 aa, Homo sapiens
CARAGGMITFGGVIVKEFDYW

SEQ ID NO: 50636 - protein, 18 aa, Homo sapiens
CARLGPYYFDNYQGFDCW

SEQ ID NO: 50637 - protein, 14 aa, Homo sapiens
CTSRLYYDDAFDIW

SEQ ID NO: 50638 - protein, 24 aa, Homo sapiens
CAHSGGSHYLPIFGVVISSWFDPW

SEQ ID NO: 50639 - protein, 16 aa, Homo sapiens
CARIWNHGRQSPFDYW

SEQ ID NO: 50640 - protein, 23 aa, Homo sapiens
CAKDKTSFTFRIAAAGRGAFDIW

SEQ ID NO: 50641 - protein, 16 aa, Homo sapiens
CAKIAGLGFGYSNDYW

SEQ ID NO: 50642 - protein, 14 aa, Homo sapiens
CARGGRYGKYFQHW

SEQ ID NO: 50643 - protein, 28 aa, Homo sapiens
CARGQYYFDSTGFPQQYHRPDLPRFQYW

SEQ ID NO: 50644 - protein, 20 aa, Homo sapiens
CARGEQWLVPGAYYYYMDVW

SEQ ID NO: 50645 - protein, 18 aa, Homo sapiens
CAKEGIYCSSTSCGFDTW

SEQ ID NO: 50646 - protein, 20 aa, Homo sapiens
CATTTSGGEGSSWSEAFDIW

SEQ ID NO: 50647 - protein, 20 aa, Homo sapiens
CAKGGYQLLFGYYYYGMDVW

SEQ ID NO: 50648 - protein, 18 aa, Homo sapiens
CARQGYSGSSLGYWFDPW

SEQ ID NO: 50649 - protein, 16 aa, Homo sapiens
CASRGSSGLPYSFDCW

SEQ ID NO: 50650 - protein, 21 aa, Homo sapiens
CAKDYSFTYYYDSSGNAFDIW

SEQ ID NO: 50651 - protein, 23 aa, Homo sapiens
CARANSPTRGTPVLVPTDASDVW

SEQ ID NO: 50652 - protein, 23 aa, Homo sapiens
CARQARYFDWGYDRYYYYGMDVW

SEQ ID NO: 50653 - protein, 23 aa, Homo sapiens
CARVGRFLEWLLGVNYYYYMDVW

SEQ ID NO: 50654 - protein, 17 aa, Homo sapiens
CARTVGALARLGEFDIW

SEQ ID NO: 50655 - protein, 26 aa, Homo sapiens
CARPLHDYYDFWSGYYEDYYYGMDVW

SEQ ID NO: 50656 - protein, 22 aa, Homo sapiens
CTTDKFGYGDYFFYYYYYMDVW

SEQ ID NO: 50657 - protein, 19 aa, Homo sapiens
CVKGNPTMIVVVITTLDYW

SEQ ID NO: 50658 - protein, 20 aa, Homo sapiens
CARPPFLRSGYARGYYFDSW

SEQ ID NO: 50659 - protein, 22 aa, Homo sapiens
CARAPINWKAGFSYYYYYMDVW

SEQ ID NO: 50660 - protein, 19 aa, Homo sapiens
CARHSRRWLQLQPTHFDYW

SEQ ID NO: 50661 - protein, 17 aa, Homo sapiens
CAKVGVPAAIARGFDYW

SEQ ID NO: 50662 - protein, 20 aa, Homo sapiens
CAREDAIRTAYNYYYYMDVW

SEQ ID NO: 50663 - protein, 21 aa, Homo sapiens
CVRDRGLCGETTCYFGWFDPW

SEQ ID NO: 50664 - protein, 15 aa, Homo sapiens
CARDAYYDPYGMDVW

SEQ ID NO: 50665 - protein, 23 aa, Homo sapiens
CARSRRKQAAGTTYQYYYYMEVW

SEQ ID NO: 50666 - protein, 22 aa, Homo sapiens
CARESYYYDSSGYYYLYYFDYW

SEQ ID NO: 50667 - protein, 18 aa, Homo sapiens
CARDIVPEISALYYFDSW

SEQ ID NO: 50668 - protein, 9 aa, Homo sapiens
CATAPLDYW

SEQ ID NO: 50669 - protein, 14 aa, Homo sapiens
CARQRVRGNFFDYW

SEQ ID NO: 50670 - protein, 21 aa, Homo sapiens
CAKVQPYDYVWGSYPEMFDYW

SEQ ID NO: 50671 - protein, 19 aa, Homo sapiens
CAKDRRLRPQYYFFAMDVW

SEQ ID NO: 50672 - protein, 20 aa, Homo sapiens
CARGSWRRLGELSHDAFDIW

SEQ ID NO: 50673 - protein, 16 aa, Homo sapiens
CAINVDTAMAGPFDYW

SEQ ID NO: 50674 - protein, 22 aa, Homo sapiens
CARDYYDSSGYPYYYYYGMDVW

SEQ ID NO: 50675 - protein, 25 aa, Homo sapiens
CARGNGHPRSSGWVQTKWTNWFDPW

SEQ ID NO: 50676 - protein, 18 aa, Homo sapiens
CARGGWNSGVLSGPNDYW

SEQ ID NO: 50677 - protein, 13 aa, Homo sapiens
CVRAAASRAFDIW

SEQ ID NO: 50678 - protein, 17 aa, Homo sapiens
CAREIRVRNYIRSFDYW

SEQ ID NO: 50679 - protein, 18 aa, Homo sapiens
CARIYYDSSGYPTLGDYW

SEQ ID NO: 50680 - protein, 19 aa, Homo sapiens
CAKGAFTQITTKGSWFDPW

SEQ ID NO: 50681 - protein, 19 aa, Homo sapiens
CAKKDKDVTVLGNEYFDSW

SEQ ID NO: 50682 - protein, 19 aa, Homo sapiens
CARDGLADYSYGGYYFDSW

SEQ ID NO: 50683 - protein, 19 aa, Homo sapiens
CAKGPRIRIVVVITEFDYW

SEQ ID NO: 50684 - protein, 23 aa, Homo sapiens
CAKGASRITMIRGGSSGDYMDVW

SEQ ID NO: 50685 - protein, 14 aa, Homo sapiens
CARGLRWEAAFDIW

SEQ ID NO: 50686 - protein, 21 aa, Homo sapiens
CAREQWIVVVVAAARGGFDYW

SEQ ID NO: 50687 - protein, 24 aa, Homo sapiens
CARAPTDRIAVALVGYYYYYMDVW

SEQ ID NO: 50688 - protein, 15 aa, Homo sapiens
CAKAHYWDENWFDPW

SEQ ID NO: 50689 - protein, 15 aa, Homo sapiens
CARAGTGGYSYTDYW

SEQ ID NO: 50690 - protein, 13 aa, Homo sapiens
CAKFADLAAADYW

SEQ ID NO: 50691 - protein, 15 aa, Homo sapiens
CARAAYYDTREFSYW

SEQ ID NO: 50692 - protein, 18 aa, Homo sapiens
CARDSWCGGDCYYFHDYW

SEQ ID NO: 50693 - protein, 21 aa, Homo sapiens
CARSSREITIFGVVTWPFDYW

SEQ ID NO: 50694 - protein, 17 aa, Homo sapiens
CARHKQWLAPIPSFDYW

SEQ ID NO: 50695 - protein, 19 aa, Homo sapiens
CAKDIGYCSGNNCKTFDYW

SEQ ID NO: 50696 - protein, 17 aa, Homo sapiens
CAKGHFSGSYVRWVDYW

SEQ ID NO: 50697 - protein, 24 aa, Homo sapiens
CARDPGDYVWGSYRYILYNWFDPW

SEQ ID NO: 50698 - protein, 23 aa, Homo sapiens
CASGKHYGDYSIIYYYYYYMDVW

SEQ ID NO: 50699 - protein, 22 aa, Homo sapiens
CARDTMNRKYCSGGSCYSLDYW

SEQ ID NO: 50700 - protein, 24 aa, Homo sapiens
CAKDRGSVDITIFGVVHHNWFDPW

SEQ ID NO: 50701 - protein, 21 aa, Homo sapiens
CVKDRVGSGIAGGPYWYFDVW

SEQ ID NO: 50702 - protein, 20 aa, Homo sapiens
CAIWGYIAAAGTSFSGFDPW

SEQ ID NO: 50703 - protein, 12 aa, Homo sapiens
CARVNQYWFDYW

SEQ ID NO: 50704 - protein, 23 aa, Homo sapiens
CARNGGGIVATITEFYYYGMDVW

SEQ ID NO: 50705 - protein, 18 aa, Homo sapiens
CARLRTAGSSAWYGTDYW

SEQ ID NO: 50706 - protein, 13 aa, Homo sapiens [sequence omitted]

SEQ ID NO: 50707 - protein, 24 aa, Homo sapiens
CARLEGRFEPIFWSGYYPYAFDIW

SEQ ID NO: 50708 - protein, 13 aa, Homo sapiens
CAHSGSGGYFDYW

SEQ ID NO: 50709 - protein, 17 aa, Homo sapiens
CARRAGLYSGSYEFDYW

SEQ ID NO: 50710 - protein, 15 aa, Homo sapiens
CARRVGGWLRYIDYW

SEQ ID NO: 50711 - protein, 19 aa, Homo sapiens
CAREAYSGYDWKNYYMDVW

SEQ ID NO: 50712 - protein, 21 aa, Homo sapiens
CARVRHDTIFGVANYYYMDVW

SEQ ID NO: 50713 - protein, 17 aa, Homo sapiens
CAKDIQPYGSGSAGDYW

SEQ ID NO: 50714 - protein, 20 aa, Homo sapiens
CAHRQYYYDSSGHGGQFDYW

SEQ ID NO: 50715 - protein, 19 aa, Homo sapiens
CVRLGPAYCSGGNCYPDYW

SEQ ID NO: 50716 - protein, 21 aa, Homo sapiens
CARGATYGSGSYYLEYYFDYW

SEQ ID NO: 50717 - protein, 19 aa, Homo sapiens
CAREGLGVTTYYHQYMDVW

SEQ ID NO: 50718 - protein, 21 aa, Homo sapiens
CATQVVVVTAQSYYYYGMDVW

SEQ ID NO: 50719 - protein, 25 aa, Homo sapiens
CAISSPKLQYSSRSGTYYNYYMDVW

SEQ ID NO: 50720 - protein, 20 aa, Homo sapiens
CTTEVWLRIQLPFYDAFDIW

SEQ ID NO: 50721 - protein, 22 aa, Homo sapiens
CAKRAPPYCGGDCSSGSEFDYW

SEQ ID NO: 50722 - protein, 23 aa, Homo sapiens
CARANGNDYVWGSYRQSNWFDPW

SEQ ID NO: 50723 - protein, 22 aa, Homo sapiens
CAKANASPFFDDAYYYYGMDVW

SEQ ID NO: 50724 - protein, 21 aa, Homo sapiens
CARRVRGFNYGHYSYFYMDVW

SEQ ID NO: 50725 - protein, 24 aa, Homo sapiens
CARSSLPATALEGPSYYYYYMDVW

SEQ ID NO: 50726 - protein, 26 aa, Homo sapiens
CARGRPLYYEPVTPDSPRGPAYFDHW

SEQ ID NO: 50727 - protein, 23 aa, Homo sapiens
CARQGERYFDWWNDRYFYGFDVW

SEQ ID NO: 50728 - protein, 21 aa, Homo sapiens
CARLRDQITIFGVVTRIFDYW

SEQ ID NO: 50729 - protein, 23 aa, Homo sapiens
CARHFYQIQLWPTDRASNWFDPW

SEQ ID NO: 50730 - protein, 19 aa, Homo sapiens
CARARDGYNYWRGDAFDIW

SEQ ID NO: 50731 - protein, 21 aa, Homo sapiens
CARVLSSTILAARDYYYMDVW

SEQ ID NO: 50732 - protein, 21 aa, Homo sapiens
CAKDSRRRFLEWLSDYYMDVW

SEQ ID NO: 50733 - protein, 22 aa, Homo sapiens
CAKSQGPYCSGGSCYSGQFDYW

SEQ ID NO: 50734 - protein, 23 aa, Homo sapiens
CARDFKYSSGWSPYYYYYYMDVW

SEQ ID NO: 50735 - protein, 15 aa, Homo sapiens
CARHLTTGSGYSDYW

SEQ ID NO: 50736 - protein, 19 aa, Homo sapiens
CARGNVRQWLQTSYYFDYW

SEQ ID NO: 50737 - protein, 15 aa, Homo sapiens
CAREDIVVVPAFDYW

SEQ ID NO: 50738 - protein, 28 aa, Homo sapiens
CTRDCFRGDRIFGVVIIPVNYYYGMDVW

SEQ ID NO: 50739 - protein, 19 aa, Homo sapiens
CVDRASGGSGYSGFYFEDW

SEQ ID NO: 50740 - protein, 18 aa, Homo sapiens
CVKDAFLTIFGVGHFDYW

SEQ ID NO: 50741 - protein, 15 aa, Homo sapiens
CARNSGWMGAPFDYW

SEQ ID NO: 50742 - protein, 23 aa, Homo sapiens
CARARFLEWLLRSSYYYYGMDVW

SEQ ID NO: 50743 - protein, 20 aa, Homo sapiens
CANTFYFDEENFYYDKFDIW

SEQ ID NO: 50744 - protein, 22 aa, Homo sapiens
CAHRGPTITIFGVVTHNWFDPW

SEQ ID NO: 50745 - protein, 22 aa, Homo sapiens
CARERRITIFGVVINSFPFGYW

SEQ ID NO: 50746 - protein, 16 aa, Homo sapiens
CAHRATMFTFVAFDIW

SEQ ID NO: 50747 - protein, 25 aa, Homo sapiens
CARELPRREYCTSTNCYEVGWFDPW

SEQ ID NO: 50748 - protein, 26 aa, Homo sapiens
CARDIGIYDYVWGSYRQRYYYGMDVW

SEQ ID NO: 50749 - protein, 11 aa, Homo sapiens
CAKWGGYEDYW

SEQ ID NO: 50750 - protein, 22 aa, Homo sapiens
CARGPLELGEEISYYYYYMDVW

SEQ ID NO: 50751 - protein, 14 aa, Homo sapiens
CARVDYSNSCFDYW

SEQ ID NO: 50752 - protein, 22 aa, Homo sapiens
CARGVVGDIVVVPAMNNWFDPW

SEQ ID NO: 50753 - protein, 22 aa, Homo sapiens
CARDHSSSSRVVGYYYYGMDVW

SEQ ID NO: 50754 - protein, 19 aa, Homo sapiens
CAKRDYADGSGFSALFDSW

SEQ ID NO: 50755 - protein, 12 aa, Homo sapiens
CARAGYQLFDFW

SEQ ID NO: 50756 - protein, 16 aa, Homo sapiens
CASLPELTVDYYFVSW

SEQ ID NO: 50757 - protein, 20 aa, Homo sapiens
CARGVGSSWSHYYYYYMDVW

SEQ ID NO: 50758 - protein, 11 aa, Homo sapiens
CARCGIRCDYW

SEQ ID NO: 50759 - protein, 20 aa, Homo sapiens
CARAVGHYDSRGFYWYFDLW

SEQ ID NO: 50760 - protein, 19 aa, Homo sapiens
CAREAVTTLFQGRPHFDYW

SEQ ID NO: 50761 - protein, 16 aa, Homo sapiens
CAREYIAAAGVGFDYW

SEQ ID NO: 50762 - protein, 25 aa, Homo sapiens
CARQSTHKQLVLYLALLPGNWFDPW

SEQ ID NO: 50763 - protein, 12 aa, Homo sapiens
CAKDSRDTMDYW

SEQ ID NO: 50764 - protein, 22 aa, Homo sapiens
CARQGTITIFGVVIIPSWFDPW

SEQ ID NO: 50765 - protein, 16 aa, Homo sapiens
CASSPSGQLWLWNDYW

SEQ ID NO: 50766 - protein, 16 aa, Homo sapiens
CARVSHGGSSSWADYW

SEQ ID NO: 50767 - protein, 25 aa, Homo sapiens
CAREGSFDYDDYLGSVRYYYYMDVW

SEQ ID NO: 50768 - protein, 22 aa, Homo sapiens
CARDLGFYYYDNSGYGFGFDMW

SEQ ID NO: 50769 - protein, 23 aa, Homo sapiens
CAKPARSSTIFGVVVENYYMDVW

SEQ ID NO: 50770 - protein, 19 aa, Homo sapiens
CAKDMGDYGDYYPGAFDIW

SEQ ID NO: 50771 - protein, 21 aa, Homo sapiens
CARRGLGYCSGGSCYSAFDYW

SEQ ID NO: 50772 - protein, 14 aa, Homo sapiens
CARTPTIYNWFDPW

SEQ ID NO: 50773 - protein, 19 aa, Homo sapiens
CAREGWIQLWGYYYGMDVW

SEQ ID NO: 50774 - protein, 21 aa, Homo sapiens
CARDGGFIAAAGTTSPTFDYW

SEQ ID NO: 50775 - protein, 16 aa, Homo sapiens
CAKGHSGSYYVAFDYW

SEQ ID NO: 50776 - protein, 20 aa, Homo sapiens
CARGRHSSGWYGIIWWFDPW

SEQ ID NO: 50777 - protein, 12 aa, Homo sapiens
CEGEMGDTFDVW

SEQ ID NO: 50778 - protein, 17 aa, Homo sapiens
CARLAVAGRAVAPFDYW

SEQ ID NO: 50779 - protein, 18 aa, Homo sapiens
CTRAPNWSSSGGPIFDYW

SEQ ID NO: 50780 - protein, 21 aa, Homo sapiens
CARGLYDYVWGSYRYGWFDPW

SEQ ID NO: 50781 - protein, 25 aa, Homo sapiens
CARDVGRPDGFWSGWGHYYYYMDVW

SEQ ID NO: 50782 - protein, 13 aa, Homo sapiens
CVRVQGGGFFDLW

SEQ ID NO: 50783 - protein, 26 aa, Homo sapiens
CARDSSPNDDYVWGSYRSTDLLFDYW

SEQ ID NO: 50784 - protein, 23 aa, Homo sapiens
CATAMSTVAPSPTLLVHYYFDYW

SEQ ID NO: 50785 - protein, 17 aa, Homo sapiens
CARMGGSGGDCHWFDPW

SEQ ID NO: 50786 - protein, 18 aa, Homo sapiens
CARHDSWWLLKTLKFDYW

SEQ ID NO: 50787 - protein, 16 aa, Homo sapiens
CAHRQAMVTREYFQHW

SEQ ID NO: 50788 - protein, 16 aa, Homo sapiens
CAKDMGSSSHGYFDYW

SEQ ID NO: 50789 - protein, 24 aa, Homo sapiens
CARHPLRYFDWLAGAFRGNWFDPW

SEQ ID NO: 50790 - protein, 21 aa, Homo sapiens
CAKGPSPGPSFLEWLFPFDYW

SEQ ID NO: 50791 - protein, 17 aa, Homo sapiens
CAKDRGYTSGWTPVDYW

SEQ ID NO: 50792 - protein, 20 aa, Homo sapiens
CARGHWTERITIFGSWFDPW

SEQ ID NO: 50793 - protein, 18 aa, Homo sapiens
CAKVAGYGDYRNWYFDLW

SEQ ID NO: 50794 - protein, 15 aa, Homo sapiens
CRVVAMAGNDVFDVW

SEQ ID NO: 50795 - protein, 24 aa, Homo sapiens
CARHGLVGITIFGVVINHNWFDPW

SEQ ID NO: 50796 - protein, 21 aa, Homo sapiens
CASLPPPSSGYYQEPWYFDLW

SEQ ID NO: 50797 - protein, 21 aa, Homo sapiens
CAKDPKGGWFGELIPNWFDPW

SEQ ID NO: 50798 - protein, 15 aa, Homo sapiens
CAKTGGNAVGGFDYW

SEQ ID NO: 50799 - protein, 18 aa, Homo sapiens
CARLDCTGGNCHRPFDHW

SEQ ID NO: 50800 - protein, 13 aa, Homo sapiens
CANQDYGGRLDYW

SEQ ID NO: 50801 - protein, 20 aa, Homo sapiens
CAKGPYYDSSGYFWGYLDYW

SEQ ID NO: 50802 - protein, 16 aa, Homo sapiens
CATSTAMEPTNWFDPW

SEQ ID NO: 50803 - protein, 12 aa, Homo sapiens
CARALGDYGSYW

SEQ ID NO: 50804 - protein, 12 aa, Homo sapiens
CCSRDSSGKKMF

SEQ ID NO: 50805 - protein, 22 aa, Homo sapiens
CAKGNYVWGSYSRGYYYYMDVW

SEQ ID NO: 50806 - protein, 17 aa, Homo sapiens
CAKGGWYSYGNTEFDYW

SEQ ID NO: 50807 - protein, 17 aa, Homo sapiens
CARALRAIVVVNEFDYW

SEQ ID NO: 50808 - protein, 18 aa, Homo sapiens
CAIGRRGGYSSSWYFDYW

SEQ ID NO: 50809 - protein, 22 aa, Homo sapiens
CAREYSVEEQLWFYYYYYMDVW

SEQ ID NO: 50810 - protein, 20 aa, Homo sapiens
CAKDAFDRSGYLVKHTFDIW

SEQ ID NO: 50811 - protein, 13 aa, Homo sapiens
CVAHGTSSDFDFW

SEQ ID NO: 50812 - protein, 19 aa, Homo sapiens
CTTHLSDPYYYDSSGLDYW

SEQ ID NO: 50813 - protein, 25 aa, Homo sapiens
CAKDMGGSGWYSVSGLLSSSAFDLW

SEQ ID NO: 50814 - protein, 24 aa, Homo sapiens
CAKGGEPQTGTTTYYYYYYYMDVW

SEQ ID NO: 50815 - protein, 19 aa, Homo sapiens
CARHERQWLDTQFHYFDYW

SEQ ID NO: 50816 - protein, 22 aa, Homo sapiens
CAKDHDPWCGGGSCYSGIVDYW

SEQ ID NO: 50817 - protein, 24 aa, Homo sapiens
CASEDIVVVPAAQQLYYYYGMDVW

SEQ ID NO: 50818 - protein, 21 aa, Homo sapiens
CTTEGEGLTGIHYYYYGMDVW

SEQ ID NO: 50819 - protein, 21 aa, Homo sapiens
CARSLCTATSCPTGAEYFDSW

SEQ ID NO: 50820 - protein, 21 aa, Homo sapiens
CSKDAPLLRFVASKTYAMDVW

SEQ ID NO: 50821 - protein, 15 aa, Homo sapiens
CATFYYSGRPALDYW

SEQ ID NO: 50822 - protein, 26 aa, Homo sapiens
CAREGGLTIFGVVIPPNYYYYGMDVW

SEQ ID NO: 50823 - protein, 18 aa, Homo sapiens
CAREDPRTGVTGHYFDYW

SEQ ID NO: 50824 - protein, 25 aa, Homo sapiens
CAKVSGYSSSSAKLVFRPPLTLDYW

SEQ ID NO: 50825 - protein, 18 aa, Homo sapiens
CTRDAHYDFWSGYYYAYW

SEQ ID NO: 50826 - protein, 24 aa, Homo sapiens
CARGGHLPYCTGGVCYTGKTFDIW

SEQ ID NO: 50827 - protein, 16 aa, Homo sapiens
CAKAGSSGWYGDFDLW

SEQ ID NO: 50828 - protein, 17 aa, Homo sapiens
CVRDSYTKDGYRLFDYW

SEQ ID NO: 50829 - protein, 14 aa, Homo sapiens
CARVGSSTWHFDNW

SEQ ID NO: 50830 - protein, 22 aa, Homo sapiens
CARGRYDIVVVVAATPPYFDYW

SEQ ID NO: 50831 - protein, 15 aa, Homo sapiens
CARVRTTGTTTFSYW

SEQ ID NO: 50832 - protein, 15 aa, Homo sapiens
CARTINGYGDYSDYW

SEQ ID NO: 50833 - protein, 22 aa, Homo sapiens
CARRRGTITMIVVVIPGPFDYW

SEQ ID NO: 50834 - protein, 22 aa, Homo sapiens
CARKTLGHCDTSTCRYNWFVSW

SEQ ID NO: 50835 - protein, 19 aa, Homo sapiens
CAKGNTMIVVVILPYFDYW

SEQ ID NO: 50836 - protein, 16 aa, Homo sapiens
CAKDIRYRDWDAFDIW

SEQ ID NO: 50837 - protein, 19 aa, Homo sapiens [sequence omitted]

SEQ ID NO: 50838 - protein, 26 aa, Homo sapiens
CARASEILRYFDWLLKISYYYYMDVW

SEQ ID NO: 50839 - protein, 25 aa, Homo sapiens
CARHGPSSQWFGNLASMSLTLLDYW

SEQ ID NO: 50840 - protein, 15 aa, Homo sapiens
CAQIDMAAAGQIDYW

SEQ ID NO: 50841 - protein, 19 aa, Homo sapiens
CARKHEMIRHYSYYGMDVW

SEQ ID NO: 50842 - protein, 11 aa, Homo sapiens
CQVWDRSTVMF

SEQ ID NO: 50843 - protein, 17 aa, Homo sapiens
CARDTNDFWSGYYFTLW

SEQ ID NO: 50844 - protein, 14 aa, Homo sapiens
CARGPHSSPHFDYW

SEQ ID NO: 50845 - protein, 11 aa, Homo sapiens
CQQFDSLPLSF

SEQ ID NO: 50846 - protein, 18 aa, Homo sapiens
CARVHYGNYAHYYYMDVW

SEQ ID NO: 50847 - protein, 22 aa, Homo sapiens
CARESRRWLQLTPYYYYGMDVW

SEQ ID NO: 50848 - protein, 24 aa, Homo sapiens
CARGFFNTIFGVVRTYYYYYMDVW

SEQ ID NO: 50849 - protein, 18 aa, Homo sapiens
CAKRRRPWGGGDCYFDYW

SEQ ID NO: 50850 - protein, 24 aa, Homo sapiens
CATALAIVSTGGTSYYYYYGMDVW

SEQ ID NO: 50851 - protein, 19 aa, Homo sapiens
CARMGIVGDGYNWMTFDYW

SEQ ID NO: 50852 - protein, 19 aa, Homo sapiens
CANGYSYGYLSEINAFDIW

SEQ ID NO: 50853 - protein, 18 aa, Homo sapiens
CARAGYDILTIEYYFDYW

SEQ ID NO: 50854 - protein, 19 aa, Homo sapiens
CARHEREGIVVVITHFDYW

SEQ ID NO: 50855 - protein, 24 aa, Homo sapiens
CARAPPVHFIQLWLKEKSGWFDPW

SEQ ID NO: 50856 - protein, 23 aa, Homo sapiens
CARQSRYYYDSSGYPTVGHFDYW

SEQ ID NO: 50857 - protein, 16 aa, Homo sapiens
CAKTQSIAAAGTLDYW

SEQ ID NO: 50858 - protein, 25 aa, Homo sapiens
CARDGRAYYYDSSGYYYDEYYFDYW

SEQ ID NO: 50859 - protein, 20 aa, Homo sapiens
CARDLVAAAGQYYYYGMDVW

SEQ ID NO: 50860 - protein, 21 aa, Homo sapiens
CASCPCRYCSSTSCGNWFDPW

SEQ ID NO: 50861 - protein, 20 aa, Homo sapiens
CSRWGRHTNNWYIGLAFDVW

SEQ ID NO: 50862 - protein, 22 aa, Homo sapiens
CARGSTIFGWGDYYYYYYMDVW

SEQ ID NO: 50863 - protein, 18 aa, Homo sapiens
CASGYSYGVYYYYYMDVW

SEQ ID NO: 50864 - protein, 23 aa, Homo sapiens
CAKAPPESHIVVVTATQYYFDYW

SEQ ID NO: 50865 - protein, 21 aa, Homo sapiens
CARIQLHYDSSGYYWDYFDYW

SEQ ID NO: 50866 - protein, 15 aa, Homo sapiens
CARVSVVTSAHFDYW

SEQ ID NO: 50867 - protein, 27 aa, Homo sapiens
CAKGPPGITIFGVVKRQDYYYYGMDVW

SEQ ID NO: 50868 - protein, 22 aa, Homo sapiens
CARSYYDILTGYSAGAFPFDYW

SEQ ID NO: 50869 - protein, 14 aa, Homo sapiens
CAKDVGQNWNFDYW

SEQ ID NO: 50870 - protein, 16 aa, Homo sapiens
CARIYSYTSSSHFDYW

SEQ ID NO: 50871 - protein, 19 aa, Homo sapiens
CASHIVVVTARSYWYFDLW

SEQ ID NO: 50872 - protein, 18 aa, Homo sapiens
CANLQTMIIVSLDAFDVW

SEQ ID NO: 50873 - protein, 19 aa, Homo sapiens
CARDQESSSWYGNDAFDIW

SEQ ID NO: 50874 - protein, 19 aa, Homo sapiens
CARVGNWNFGFFSYYMDVW

SEQ ID NO: 50875 - protein, 24 aa, Homo sapiens
CARGRTLFRSSSGLNDYYFYLDVW

SEQ ID NO: 50876 - protein, 22 aa, Homo sapiens
CARVPPVTIFGVVIESGPFDYW

SEQ ID NO: 50877 - protein, 20 aa, Homo sapiens
CARHPRQWLVLTRLGHFDYW

SEQ ID NO: 50878 - protein, 20 aa, Homo sapiens
CAREELYDFWSGQRYYFDYW

SEQ ID NO: 50879 - protein, 20 aa, Homo sapiens
CARDPHGITIFGVSAHSDYW

SEQ ID NO: 50880 - protein, 26 aa, Homo sapiens
CARDRARDDVITIFGVVPYYYGMDVW

SEQ ID NO: 50881 - protein, 21 aa, Homo sapiens
CAKFGGGSYYDILTGSPFDYW

SEQ ID NO: 50882 - protein, 22 aa, Homo sapiens
CARGGITFGGVIVKVYNWFDPW

SEQ ID NO: 50883 - protein, 14 aa, Homo sapiens
CARDRMFGDQKDYW

SEQ ID NO: 50884 - protein, 16 aa, Homo sapiens
CARRVPDYYYFYMDVW

SEQ ID NO: 50885 - protein, 27 aa, Homo sapiens
CARDPPVDILATKETSGKYYYQYMDVW

SEQ ID NO: 50886 - protein, 17 aa, Homo sapiens
CARASSGTTHPYNFDYW

SEQ ID NO: 50887 - protein, 23 aa, Homo sapiens
CARGPSPDYSSGWYYYYYYMDVW

SEQ ID NO: 50888 - protein, 27 aa, Homo sapiens
CTRNPVFRYCSSTSCSASYYYYGMDVW

SEQ ID NO: 50889 - protein, 23 aa, Homo sapiens
CARDLLASGSYLGDYYYYGMDVW

SEQ ID NO: 50890 - protein, 20 aa, Homo sapiens
CARARSSSSSRLGNWNFDIW

SEQ ID NO: 50891 - protein, 17 aa, Homo sapiens
CAVDTVTTGVGGAFDIW

SEQ ID NO: 50892 - protein, 19 aa, Homo sapiens
CARDYPRAYDSSGYHFDYW

SEQ ID NO: 50893 - protein, 24 aa, Homo sapiens
CAKRGPRITMVRGVIIMTGYFDYW

SEQ ID NO: 50894 - protein, 19 aa, Homo sapiens
CAKDTGGFVAASDNWFDPW

SEQ ID NO: 50895 - protein, 18 aa, Homo sapiens
CARANACSGGSCYYIDYW

SEQ ID NO: 50896 - protein, 25 aa, Homo sapiens
CARRPIGGILTGYYVRHYYYGMDVW

SEQ ID NO: 50897 - protein, 24 aa, Homo sapiens
CARRGEYSSLPRGYYYYYYGMDVW

SEQ ID NO: 50898 - protein, 16 aa, Homo sapiens
CARGMPGSGELLLDYW

SEQ ID NO: 50899 - protein, 22 aa, Homo sapiens
CARVPTHSGSYYWNIGDWFDPW

SEQ ID NO: 50900 - protein, 24 aa, Homo sapiens
CAREISPGDPYSSSWFLYGPPDYW

SEQ ID NO: 50901 - protein, 20 aa, Homo sapiens
CATTFCGIDCYPDYYYIDVW

SEQ ID NO: 50902 - protein, 17 aa, Homo sapiens
CAHLHSSGWLGDWFDPW

SEQ ID NO: 50903 - protein, 17 aa, Homo sapiens
CAKDTHGSAYWSNFDDW

SEQ ID NO: 50904 - protein, 18 aa, Homo sapiens
CARRALYCGGDCFSFDFW

SEQ ID NO: 50905 - protein, 20 aa, Homo sapiens
CARGYRGLRYFDWLLSFDYW

SEQ ID NO: 50906 - protein, 20 aa, Homo sapiens
CARGGVQWLVPGYDNWFDPW

SEQ ID NO: 50907 - protein, 18 aa, Homo sapiens
CAKTGYSYGYTLGLFDYW

SEQ ID NO: 50908 - protein, 18 aa, Homo sapiens
CARESFVSFGDPAIVDYW

SEQ ID NO: 50909 - protein, 22 aa, Homo sapiens
CARDSKDFVVMLFSIRGAPDYW

SEQ ID NO: 50910 - protein, 16 aa, Homo sapiens
CARALSGGYQNAFDIW

SEQ ID NO: 50911 - protein, 20 aa, Homo sapiens
CAKDQPGILGAVLGDWFDPW

SEQ ID NO: 50912 - protein, 18 aa, Homo sapiens
CARDSGSYDYGDYLLDYW

SEQ ID NO: 50913 - protein, 26 aa, Homo sapiens
CAKETRRDGYNILAVRVYYYYGMDVW

SEQ ID NO: 50914 - protein, 21 aa, Homo sapiens
CARFGLMITFGPPPTFYFDPW

SEQ ID NO: 50915 - protein, 20 aa, Homo sapiens
CARDSVTTSDDGAYNWFDPW

SEQ ID NO: 50916 - protein, 18 aa, Homo sapiens
CARDHCSITSCRLAFDYW

SEQ ID NO: 50917 - protein, 22 aa, Homo sapiens
CARGGAVAGRDDYYYYYGMDVW

SEQ ID NO: 50918 - protein, 15 aa, Homo sapiens
CVKDTTLFGDFADYW

SEQ ID NO: 50919 - protein, 23 aa, Homo sapiens
CTSTSCYKDEGKSGYYYYGMDVW

SEQ ID NO: 50920 - protein, 17 aa, Homo sapiens
CARDALDNYYYYYMDVW

SEQ ID NO: 50921 - protein, 19 aa, Homo sapiens
CASNAGYDSSAYYRPFDYW

SEQ ID NO: 50922 - protein, 16 aa, Homo sapiens
CARGRYGYNTYVFDDW

SEQ ID NO: 50923 - protein, 20 aa, Homo sapiens
CAKWGNCSGSSCSLKPFDPW

SEQ ID NO: 50924 - protein, 14 aa, Homo sapiens
CARRGFSQLAFDIW

SEQ ID NO: 50925 - protein, 17 aa, Homo sapiens
CARPSRDFWSGFAFDIW

SEQ ID NO: 50926 - protein, 17 aa, Homo sapiens
CASIRRGQLWSYAFDIW

SEQ ID NO: 50927 - protein, 20 aa, Homo sapiens
CARGDVGYCSGGSCYYFDYW

SEQ ID NO: 50928 - protein, 23 aa, Homo sapiens
CARDYRRGLPYFDWLGGNWFDPW

SEQ ID NO: 50929 - protein, 19 aa, Homo sapiens
CARYPGGGYYPHYYYMDVW

SEQ ID NO: 50930 - protein, 17 aa, Homo sapiens
CAREPRGFGESGYMDVW

SEQ ID NO: 50931 - protein, 17 aa, Homo sapiens
CAREGYAVADLGAFDIW

SEQ ID NO: 50932 - protein, 18 aa, Homo sapiens
CVVSSLARGIIITGYDYW

SEQ ID NO: 50933 - protein, 21 aa, Homo sapiens
CARGRTTLWGSYYYYYGMDVW

SEQ ID NO: 50934 - protein, 15 aa, Homo sapiens
CAQSHLGTYFAFDSW

SEQ ID NO: 50935 - protein, 29 aa, Homo sapiens
CAKVGGGGYCSGGSCYSMTLRGRGNFDPW

SEQ ID NO: 50936 - protein, 19 aa, Homo sapiens
CARHHTVAVLSLIYYFDYW

SEQ ID NO: 50937 - protein, 23 aa, Homo sapiens
CAKDMGFPKYYYDSSGWNYFDYW

SEQ ID NO: 50938 - protein, 32 aa, Homo sapiens
CALPICLRAEDTAVYYCAREGLVAAGYYFDSW

SEQ ID NO: 50939 - protein, 18 aa, Homo sapiens
CAGISGWYEGVDDAFDIW

SEQ ID NO: 50940 - protein, 15 aa, Homo sapiens
CVRKGILAPDAFDIW

SEQ ID NO: 50941 - protein, 23 aa, Homo sapiens
CARVFVGIEAMIVVYYYYYMDVW

SEQ ID NO: 50942 - protein, 16 aa, Homo sapiens
CQSYDRSLSGPYRYVF

SEQ ID NO: 50943 - protein, 24 aa, Homo sapiens
CARHWGRSITIFGVVTSAYYFDYW

SEQ ID NO: 50944 - protein, 21 aa, Homo sapiens
CARDGRAGDCSGGSCNDLDYW

SEQ ID NO: 50945 - protein, 20 aa, Homo sapiens
CATAPGIAVAGTRVHWFDPW

SEQ ID NO: 50946 - protein, 19 aa, Homo sapiens
CVKVSGAYYADRSGRFDNW

SEQ ID NO: 50947 - protein, 17 aa, Homo sapiens
CAKDHFSYDSIVHFDYW

SEQ ID NO: 50948 - protein, 17 aa, Homo sapiens
CAKDMWSGYGGPEFDYW

SEQ ID NO: 50949 - protein, 13 aa, Homo sapiens
CAHLYGDDGVDYW

SEQ ID NO: 50950 - protein, 21 aa, Homo sapiens
CAKDPERYCSGGSCYGGSDYW

SEQ ID NO: 50951 - protein, 21 aa, Homo sapiens
CARDRGGTSYTSSQHDAFEIW

SEQ ID NO: 50952 - protein, 28 aa, Homo sapiens
CAKDVRYFDWLLYLDTGRYYYYYGMDVW

SEQ ID NO: 50953 - protein, 24 aa, Homo sapiens
CARDGIADVDIVATTTPFGWFDPW

SEQ ID NO: 50954 - protein, 20 aa, Homo sapiens
CARELISLPGAGAVDYFDYW

SEQ ID NO: 50955 - protein, 13 aa, Homo sapiens
CPRVRGSKWFDSW

SEQ ID NO: 50956 - protein, 20 aa, Homo sapiens
CAKDISGDRSGSYYSPSDYW

SEQ ID NO: 50957 - protein, 23 aa, Homo sapiens
CARGGVTIFGVVTNYYYYYMDVW

SEQ ID NO: 50958 - protein, 15 aa, Homo sapiens
CSSYISSSTLEGIIF

SEQ ID NO: 50959 - protein, 16 aa, Homo sapiens
CARAGLDGYSSGLDYW

SEQ ID NO: 50960 - protein, 23 aa, Homo sapiens
CAKSAEQLITMIVVVTIGYFDYW

SEQ ID NO: 50961 - protein, 22 aa, Homo sapiens
CARSFYDSSGYYYVFSDYFDYW

SEQ ID NO: 50962 - protein, 22 aa, Homo sapiens
CARGTTVTTFFPRAPYNWFDPW

SEQ ID NO: 50963 - protein, 22 aa, Homo sapiens
CARGTIAAAGLGVYYYYGMDVW

SEQ ID NO: 50964 - protein, 24 aa, Homo sapiens
CAKDGSLFYDILTGYYNPYYFDYW

SEQ ID NO: 50965 - protein, 16 aa, Homo sapiens
CAGGLSSSWFDAFDIW

SEQ ID NO: 50966 - protein, 18 aa, Homo sapiens
CARDNHYDFWSGYAFDIW

SEQ ID NO: 50967 - protein, 19 aa, Homo sapiens
CARGHVVVVAATPEWFDPW

SEQ ID NO: 50968 - protein, 13 aa, Homo sapiens
CAKLGALHCFDFW

SEQ ID NO: 50969 - protein, 11 aa, Homo sapiens
CAINWNLFDYW

SEQ ID NO: 50970 - protein, 19 aa, Homo sapiens
CARLRLRDADTTFHRFDPW

SEQ ID NO: 50971 - protein, 15 aa, Homo sapiens
CAKRSFPLSGPLDYW

SEQ ID NO: 50972 - protein, 20 aa, Homo sapiens
CARDNIWERTTVVGGAFDIW

SEQ ID NO: 50973 - protein, 17 aa, Homo sapiens
CAKERLGELSLSSFDYW

SEQ ID NO: 50974 - protein, 25 aa, Homo sapiens
CARPIYDSSGYYTPTVSGSDAFDIW

SEQ ID NO: 50975 - protein, 29 aa, Homo sapiens
CARAGTYYYDSSGYFSFYGLRGYYYMDVW

SEQ ID NO: 50976 - protein, 19 aa, Homo sapiens
CASTNYYDSSGYLHWFDPW

SEQ ID NO: 50977 - protein, 22 aa, Homo sapiens
CARALEPLLWFGELSNDAFDIW

SEQ ID NO: 50978 - protein, 23 aa, Homo sapiens
CTSPPPSIAAAGTPYYYYGMDVW

SEQ ID NO: 50979 - protein, 19 aa, Homo sapiens
CAKPKAADQILLGDHFDSW

SEQ ID NO: 50980 - protein, 19 aa, Homo sapiens
CARVRGQNYYDPSGYIDSW

SEQ ID NO: 50981 - protein, 16 aa, Homo sapiens
CARGRPYDARGAFDIW

SEQ ID NO: 50982 - protein, 17 aa, Homo sapiens
CARHGLLWFGPDQSDYW

SEQ ID NO: 50983 - protein, 18 aa, Homo sapiens
CARAGDMATTKNNGFDIW

SEQ ID NO: 50984 - protein, 17 aa, Homo sapiens
CAKDMVRGATQPLFDYW

SEQ ID NO: 50985 - protein, 27 aa, Homo sapiens
CARESYEYSSSDRYSYGSYYYYYMDVW

SEQ ID NO: 50986 - protein, 20 aa, Homo sapiens
CAREQDDCTGFNCYPAFDSW

SEQ ID NO: 50987 - protein, 16 aa, Homo sapiens
CARVLRGVVIWYFDLW

SEQ ID NO: 50988 - protein, 18 aa, Homo sapiens
CARSFPHYYGSGSPLDYW

SEQ ID NO: 50989 - protein, 22 aa, Homo sapiens
CAREVVVVVRGVTPYYYGMDVW

SEQ ID NO: 50990 - protein, 23 aa, Homo sapiens
CARGAILHDYIWGSYRANYIDYW

SEQ ID NO: 50991 - protein, 16 aa, Homo sapiens
CARDLSDPYGSGLDYW

SEQ ID NO: 50992 - protein, 14 aa, Homo sapiens
CARDASGGSYTDYW

SEQ ID NO: 50993 - protein, 20 aa, Homo sapiens
CASWGRYCTNTSCYPWFDPW

SEQ ID NO: 50994 - protein, 25 aa, Homo sapiens
CARVKFAVQMDRRRTFYYYPGMDVW

SEQ ID NO: 50995 - protein, 21 aa, Homo sapiens
CAKLSVGGIPYGDYDRSTDYW

SEQ ID NO: 50996 - protein, 16 aa, Homo sapiens
CAEALPYGGLDAFDIW

SEQ ID NO: 50997 - protein, 17 aa, Homo sapiens
CARDSTGLWQQSALDYW

SEQ ID NO: 50998 - protein, 18 aa, Homo sapiens
CARSPDLIDSSGQSFDFW

SEQ ID NO: 50999 - protein, 22 aa, Homo sapiens
CAREAGDFWSGYYTPFDAFDIW

SEQ ID NO: 51000 - protein, 21 aa, Homo sapiens
CARDPPSIAAAGIGFYYFDYW

SEQ ID NO: 51001 - protein, 24 aa, Homo sapiens
CARPESIDFWSGYYTGMGSYMDVW

SEQ ID NO: 51002 - protein, 21 aa, Homo sapiens
CAKGYSGYDTALYYYYYMDVW

SEQ ID NO: 51003 - protein, 20 aa, Homo sapiens
CARHGGIAAAGTRENYFDYW

SEQ ID NO: 51004 - protein, 23 aa, Homo sapiens
CARELHDYGDYPPYYYYYYMDVW

SEQ ID NO: 51005 - protein, 23 aa, Homo sapiens
CARARYYGSPEETPYYYYGMDVW

SEQ ID NO: 51006 - protein, 15 aa, Homo sapiens
CALVATMGEDAFEIW

SEQ ID NO: 51007 - protein, 16 aa, Homo sapiens
CAHDFAGFWLGAFNYW

SEQ ID NO: 51008 - protein, 18 aa, Homo sapiens
CAKEGGTAMDVFHYFDYW

SEQ ID NO: 51009 - protein, 16 aa, Homo sapiens
CAKIGRDYGDAAFDYW

SEQ ID NO: 51010 - protein, 15 aa, Homo sapiens
CATHPGYSGPYYYYW

SEQ ID NO: 51011 - protein, 19 aa, Homo sapiens
CARSNYDFWSGSFTPFDYW

SEQ ID NO: 51012 - protein, 16 aa, Homo sapiens
CAHIVVVIGGYYFDYW

SEQ ID NO: 51013 - protein, 16 aa, Homo sapiens
CAKPIQPQIYDPFDYW

SEQ ID NO: 51014 - protein, 16 aa, Homo sapiens
CAKDRTGDPSPGLDYW

SEQ ID NO: 51015 - protein, 24 aa, Homo sapiens
CAKDGEGIAVAGLDYYYYYYMDVW

SEQ ID NO: 51016 - protein, 17 aa, Homo sapiens
CAREMVGRIAAAPFDYW

SEQ ID NO: 51017 - protein, 16 aa, Homo sapiens
CASHSSSPPARPFGYW

SEQ ID NO: 51018 - protein, 16 aa, Homo sapiens
CARLDDILTGRQADYW

SEQ ID NO: 51019 - protein, 20 aa, Homo sapiens
CARGSHYDFWSGYYSMADYW

SEQ ID NO: 51020 - protein, 18 aa, Homo sapiens
CARVSGGQQLVQNYFDYW

SEQ ID NO: 51021 - protein, 21 aa, Homo sapiens
CARDQWQQLVLDYYYYYMDVW

SEQ ID NO: 51022 - protein, 13 aa, Homo sapiens
CARSPSYQPLDYW

SEQ ID NO: 51023 - protein, 16 aa, Homo sapiens
CAKHLAYHWNPPFDSW

SEQ ID NO: 51024 - protein, 24 aa, Homo sapiens
CARDFPFGDFWSGYQTVLDGMDVW

SEQ ID NO: 51025 - protein, 22 aa, Homo sapiens
CARVFGYDFWSGYARNNWFDPW

SEQ ID NO: 51026 - protein, 18 aa, Homo sapiens
CARGVTTTRPHHDAFDVW

SEQ ID NO: 51027 - protein, 16 aa, Homo sapiens
CATDWAVYGINRFDYW

SEQ ID NO: 51028 - protein, 16 aa, Homo sapiens
CARALNTVVTHYFDYW

SEQ ID NO: 51029 - protein, 17 aa, Homo sapiens
CARDRRVNIVNDAFDIW

SEQ ID NO: 51030 - protein, 20 aa, Homo sapiens
CAKEGVCSTASCLHSLFDSW

SEQ ID NO: 51031 - protein, 13 aa, Homo sapiens
CARPTSGAVFDIW

SEQ ID NO: 51032 - protein, 22 aa, Homo sapiens
CAREDDYGYSSGWYKPYAFDIW

SEQ ID NO: 51033 - protein, 17 aa, Homo sapiens
CARGTKEKYSSNAFDVW

SEQ ID NO: 51034 - protein, 22 aa, Homo sapiens
CARQRGGYSNYRHFIENWFDPW

SEQ ID NO: 51035 - protein, 15 aa, Homo sapiens
CASQVFHGGAYFRAW

SEQ ID NO: 51036 - protein, 17 aa, Homo sapiens
CAHRRSTVSSYYYMDVW

SEQ ID NO: 51037 - protein, 20 aa, Homo sapiens
CARDSDDFWSGYYLVYFDYW

SEQ ID NO: 51038 - protein, 15 aa, Homo sapiens
CARDPSDPVGWFDPW

SEQ ID NO: 51039 - protein, 18 aa, Homo sapiens
CARDFSYDFWSAPPFDPW

SEQ ID NO: 51040 - protein, 26 aa, Homo sapiens
CASISRGSGHTYYYDSSGYYSALDYW

SEQ ID NO: 51041 - protein, 16 aa, Homo sapiens
CAREGGGSGLNAFDIW

SEQ ID NO: 51042 - protein, 31 aa, Homo sapiens
CARDGTYYDFWSGYFPSAVHSYYYYYYMDVW

SEQ ID NO: 51043 - protein, 18 aa, Homo sapiens
CARPTAHSSGWPDAFDIW

SEQ ID NO: 51044 - protein, 15 aa, Homo sapiens
CATGSLWDPSWFDPW

SEQ ID NO: 51045 - protein, 10 aa, Homo sapiens
CAAQNSFGYW

SEQ ID NO: 51046 - protein, 27 aa, Homo sapiens
CARIPTTRTYDWDTNTLSYYFYGMDVW

SEQ ID NO: 51047 - protein, 13 aa, Homo sapiens
CMQATQFPPALTF

SEQ ID NO: 51048 - protein, 27 aa, Homo sapiens
CATSRAAGDYDYIWGSYRYKENWFDPW

SEQ ID NO: 51049 - protein, 28 aa, Homo sapiens
CARGSLLYDILTGYSQSQYYYYYGMDVW

SEQ ID NO: 51050 - protein, 24 aa, Homo sapiens
CAKEKTIMITFGGVIVIPPHLDYW

SEQ ID NO: 51051 - protein, 22 aa, Homo sapiens
CARGGYRTPGRTNYYYYYMDVW

SEQ ID NO: 51052 - protein, 20 aa, Homo sapiens
CARRPAILRYFDWLFAFDIW

SEQ ID NO: 51053 - protein, 16 aa, Homo sapiens
CARAGIDYGDYVYDYW

SEQ ID NO: 51054 - protein, 23 aa, Homo sapiens
CASPLGYCTGGVCYPGAYAFDIW

SEQ ID NO: 51055 - protein, 21 aa, Homo sapiens
CAKVNYDILTGYSGYYYMDVW

SEQ ID NO: 51056 - protein, 19 aa, Homo sapiens
CARHVTDFWSDQLIYFDYW

SEQ ID NO: 51057 - protein, 20 aa, Homo sapiens
CARARMTTVTTRIVFLFDYW

SEQ ID NO: 51058 - protein, 22 aa, Homo sapiens
CARIRDSSSWWATGPEYYFDYW

SEQ ID NO: 51059 - protein, 15 aa, Homo sapiens
CARGYRSSWYWFDRW

SEQ ID NO: 51060 - protein, 21 aa, Homo sapiens
CARQPPYSNYGSDYYYYMDVW

SEQ ID NO: 51061 - protein, 18 aa, Homo sapiens
CARDPTGSYSSGYYFDYW

SEQ ID NO: 51062 - protein, 14 aa, Homo sapiens
CAKDRQAAWSKDYW

SEQ ID NO: 51063 - protein, 13 aa, Homo sapiens
CTRGAGMHYFDPW

SEQ ID NO: 51064 - protein, 21 aa, Homo sapiens
CARAGGYYGSRNYYNYFFDSW

SEQ ID NO: 51065 - protein, 17 aa, Homo sapiens
CARLAGVVVAATPFDYW

SEQ ID NO: 51066 - protein, 17 aa, Homo sapiens
CARDNRVYDTYYGMDVW

SEQ ID NO: 51067 - protein, 20 aa, Homo sapiens
CARQAYYCTGGVCYSWFDPW

SEQ ID NO: 51068 - protein, 15 aa, Homo sapiens
CATQNHPRTVTFGYW

SEQ ID NO: 51069 - protein, 19 aa, Homo sapiens
CARRRAPWNDDNSDFFDYW

SEQ ID NO: 51070 - protein, 27 aa, Homo sapiens
CAVTLDVRYCSSTSCYKDYYYYGMDVW

SEQ ID NO: 51071 - protein, 13 aa, Homo sapiens
CARDVGDHYLGYW

SEQ ID NO: 51072 - protein, 18 aa, Homo sapiens
CARGPSPSRGYDSYFDYW

SEQ ID NO: 51073 - protein, 18 aa, Homo sapiens
CARFAVQGVRAQNWFDPW

SEQ ID NO: 51074 - protein, 16 aa, Homo sapiens
CASPMTTVAWGRFDFW

SEQ ID NO: 51075 - protein, 16 aa, Homo sapiens
CARDITVTHLRWFDPW

SEQ ID NO: 51076 - protein, 27 aa, Homo sapiens
CARQGAYDYIWGTPRLVGYYYYYMDVW

SEQ ID NO: 51077 - protein, 16 aa, Homo sapiens
CTRSRGVGIASAFDIW

SEQ ID NO: 51078 - protein, 23 aa, Homo sapiens
CARSATHEVPIFGVVTPNWFDPW

SEQ ID NO: 51079 - protein, 16 aa, Homo sapiens
CATKSSGYFFSPFDSW

SEQ ID NO: 51080 - protein, 15 aa, Homo sapiens
CAKDYEAGTSAHDYW

SEQ ID NO: 51081 - protein, 19 aa, Homo sapiens
CARRYGENVSPYYHYIDVW

SEQ ID NO: 51082 - protein, 17 aa, Homo sapiens
CARSIAVAPLYDAFDIW

SEQ ID NO: 51083 - protein, 24 aa, Homo sapiens
CARDRLPKRIFGLKVSAANWFDPW

SEQ ID NO: 51084 - protein, 18 aa, Homo sapiens
CARIPECIYGDYFSFDYW

SEQ ID NO: 51085 - protein, 26 aa, Homo sapiens
CAREQGLSNYDFWDGGRYYYYYMDVW

SEQ ID NO: 51086 - protein, 14 aa, Homo sapiens
CARVTTVISIFDYW

SEQ ID NO: 51087 - protein, 23 aa, Homo sapiens
CAREGSGIYGSYWSRGAGGFDIW

SEQ ID NO: 51088 - protein, 16 aa, Homo sapiens
CARDLPAARLPEDDYW

SEQ ID NO: 51089 - protein, 21 aa, Homo sapiens
CARIRNNYYDSSGYYDAFDIW

SEQ ID NO: 51090 - protein, 18 aa, Homo sapiens
CAKKEAAGSGSYANFDYW

SEQ ID NO: 51091 - protein, 21 aa, Homo sapiens
CARVGYGGNIPYYYYYYMDVW

SEQ ID NO: 51092 - protein, 15 aa, Homo sapiens
CARGRVARAPFFDSW

SEQ ID NO: 51093 - protein, 22 aa, Homo sapiens
CAREGLWSGYYTVAYYYYMDVW

SEQ ID NO: 51094 - protein, 21 aa, Homo sapiens
CARDNSAAAGELYYYYGMDVW

SEQ ID NO: 51095 - protein, 20 aa, Homo sapiens
CARIWYSSGWYGGDAGLDYW

SEQ ID NO: 51096 - protein, 14 aa, Homo sapiens
CARTAKQLDLYDYW

SEQ ID NO: 51097 - protein, 22 aa, Homo sapiens
CARDNHDLQTYYYDSSGYYDLW

SEQ ID NO: 51098 - protein, 20 aa, Homo sapiens
CARDLPPWDSNQYYYGMDVW

SEQ ID NO: 51099 - protein, 16 aa, Homo sapiens
CARDPPYYQGGSLDYW

SEQ ID NO: 51100 - protein, 20 aa, Homo sapiens
CARLVGVIAVAGVRQYFDLW

SEQ ID NO: 51101 - protein, 20 aa, Homo sapiens
CARDTPWGYCSGGSCSSDYW

SEQ ID NO: 51102 - protein, 19 aa, Homo sapiens
CARLDYGDYEGQDDAFDIW

SEQ ID NO: 51103 - protein, 22 aa, Homo sapiens
CARLSLRGYDAFDYYYYGMDVW

SEQ ID NO: 51104 - protein, 17 aa, Homo sapiens
CTSGGILTGYYATSDYW

SEQ ID NO: 51105 - protein, 26 aa, Homo sapiens
CARSIRDYYYDSSGYYLAVENWFDPW

SEQ ID NO: 51106 - protein, 20 aa, Homo sapiens
CARINWYSSGWYDDDYFDYW

SEQ ID NO: 51107 - protein, 17 aa, Homo sapiens
CARSPEDYDFWTGFDYW

SEQ ID NO: 51108 - protein, 19 aa, Homo sapiens
CARALEPYDSSGYYCPDYW

SEQ ID NO: 51109 - protein, 16 aa, Homo sapiens
CVRTSRGGALDYYDYW

SEQ ID NO: 51110 - protein, 16 aa, Homo sapiens
CANAVGGYDPYYFDYW

SEQ ID NO: 51111 - protein, 16 aa, Homo sapiens
CAKRPYSSSWYSADYW

SEQ ID NO: 51112 - protein, 17 aa, Homo sapiens
CVREHGDYHPGNYVVYW

SEQ ID NO: 51113 - protein, 13 aa, Homo sapiens
CAHRTEKDWFDPW

SEQ ID NO: 51114 - protein, 18 aa, Homo sapiens
CAKLRYSGYDYSIPFDYW

SEQ ID NO: 51115 - protein, 24 aa, Homo sapiens
CARAYYDFWSGYPSYYYYYGMDVW

SEQ ID NO: 51116 - protein, 17 aa, Homo sapiens
CAKAPSVSYYWGTFDYW

SEQ ID NO: 51117 - protein, 18 aa, Homo sapiens
CARDLKGVVAVSDYFDYW

SEQ ID NO: 51118 - protein, 19 aa, Homo sapiens
CARESLYSGSHLGGAFDIW

SEQ ID NO: 51119 - protein, 24 aa, Homo sapiens
CAHRDVAYYDILTGYYPNNWFDPW

SEQ ID NO: 51120 - protein, 28 aa, Homo sapiens
CARGGYGSGSYYNMRPYSKYYYYYMDVW

SEQ ID NO: 51121 - protein, 17 aa, Homo sapiens
CAKSVDILTGYYIFDYW

SEQ ID NO: 51122 - protein, 22 aa, Homo sapiens
CARGSDFWSGYYYRSRYYFDYW

SEQ ID NO: 51123 - protein, 26 aa, Homo sapiens
CARDGDHITIFGVPTHYYYYYGMDVW

SEQ ID NO: 51124 - protein, 24 aa, Homo sapiens
CARSNEIVLGYCSSTSCLDWFDPW

SEQ ID NO: 51125 - protein, 16 aa, Homo sapiens
CARENNCGGDCPLDYW

SEQ ID NO: 51126 - protein, 17 aa, Homo sapiens
CAREDYGDYLERAFDIW

SEQ ID NO: 51127 - protein, 17 aa, Homo sapiens
CAKDIYTYSSGYYFDYW

SEQ ID NO: 51128 - protein, 24 aa, Homo sapiens
CARSTPGRWDTIFGVVTFAQFDYW

SEQ ID NO: 51129 - protein, 16 aa, Homo sapiens
CASPPRGYSADWFDPW

SEQ ID NO: 51130 - protein, 19 aa, Homo sapiens
CAVFRGSSWPNYYYGMDVW

SEQ ID NO: 51131 - protein, 22 aa, Homo sapiens
CARDNGGYSSSSDWFRSDFDYW

SEQ ID NO: 51132 - protein, 19 aa, Homo sapiens
CAREEVTTVTTNYYYMDVW

SEQ ID NO: 51133 - protein, 18 aa, Homo sapiens
CARAAPYGDYVYWYFDLW

SEQ ID NO: 51134 - protein, 19 aa, Homo sapiens
CARVGGDGYNYPYYAFDIW

SEQ ID NO: 51135 - protein, 12 aa, Homo sapiens
CAGEQLEPYFYW

SEQ ID NO: 51136 - protein, 15 aa, Homo sapiens
CAKPSDSSGADFEYW

SEQ ID NO: 51137 - protein, 17 aa, Homo sapiens
CARVWVEQWLVSWFDPW

SEQ ID NO: 51138 - protein, 16 aa, Homo sapiens
CASLRRGILTGYIDYW

SEQ ID NO: 51139 - protein, 19 aa, Homo sapiens
CARDFMITFGGVIWWFDPW

SEQ ID NO: 51140 - protein, 19 aa, Homo sapiens
CTTSMGGMYSSGWYSFDYW

SEQ ID NO: 51141 - protein, 16 aa, Homo sapiens
CARDLEGVNDNWFDPW

SEQ ID NO: 51142 - protein, 17 aa, Homo sapiens
CAHRQSRGLLSHPFDYW

SEQ ID NO: 51143 - protein, 20 aa, Homo sapiens
CAHWGSYDYIWGSYPTFDYW

SEQ ID NO: 51144 - protein, 18 aa, Homo sapiens
CARSVLVVYAIDLALDYW

SEQ ID NO: 51145 - protein, 22 aa, Homo sapiens
CVKDVTRCGSNHCLWDYYLDYW

SEQ ID NO: 51146 - protein, 21 aa, Homo sapiens
CARAGWKSCSGGSCYTFADYW

SEQ ID NO: 51147 - protein, 21 aa, Homo sapiens
CARALWRYSNYYYYYYGMDVW

SEQ ID NO: 51148 - protein, 21 aa, Homo sapiens
CARALSQKLVPGADRTPFDSW

SEQ ID NO: 51149 - protein, 21 aa, Homo sapiens
CARDICSSTSCYFGYYGMDVW

SEQ ID NO: 51150 - protein, 20 aa, Homo sapiens
CASLTTTVVTNRDRDAFDIW

SEQ ID NO: 51151 - protein, 17 aa, Homo sapiens
CARSPGYSTRWDGFDIW

SEQ ID NO: 51152 - protein, 20 aa, Homo sapiens
CAHTAVWSGYYAGHDAFDIW

SEQ ID NO: 51153 - protein, 16 aa, Homo sapiens
CATGPTFWPSDAFDIW

SEQ ID NO: 51154 - protein, 30 aa, Homo sapiens
CARGSWRQPPARYCSGGSCYSYYYYGMDVW

SEQ ID NO: 51155 - protein, 15 aa, Homo sapiens
CMIAVAGLPSAFDIW

SEQ ID NO: 51156 - protein, 27 aa, Homo sapiens
CARGSRVLNYDILTGYSPYYYYGMDVW

SEQ ID NO: 51157 - protein, 27 aa, Homo sapiens
CATEEPKSYDYIWGSPTYYYYYGMDVW

SEQ ID NO: 51158 - protein, 21 aa, Homo sapiens
CARDYYDSSGYLLYGNAFDIW

SEQ ID NO: 51159 - protein, 16 aa, Homo sapiens
CAREYSGYDSSAFDYW

SEQ ID NO: 51160 - protein, 17 aa, Homo sapiens
CARERMLQGVASGFDIW

SEQ ID NO: 51161 - protein, 15 aa, Homo sapiens
CARGVNGVGFPLDYW

SEQ ID NO: 51162 - protein, 30 aa, Homo sapiens
CAKESALSYDILTGYSPPRESYYYYGMDVW

SEQ ID NO: 51163 - protein, 23 aa, Homo sapiens
CARALYAQGESDYDDYVAAFDIW

SEQ ID NO: 51164 - protein, 16 aa, Homo sapiens
CARDRQQLVQDEFDYW

SEQ ID NO: 51165 - protein, 25 aa, Homo sapiens
CARSRYYDFWSGYYFPERSYYFDYW

SEQ ID NO: 51166 - protein, 19 aa, Homo sapiens
CARDAHLHAPPSTGALDYW

SEQ ID NO: 51167 - protein, 22 aa, Homo sapiens
CARDGSGVTIFGVVIMYYFDYW

SEQ ID NO: 51168 - protein, 17 aa, Homo sapiens
CARDNNIAAAGTGFDYW

SEQ ID NO: 51169 - protein, 17 aa, Homo sapiens
CARMYDYIWGSYYMDVW

SEQ ID NO: 51170 - protein, 21 aa, Homo sapiens
CARDFDGDYPVRYYYYYMDVW

SEQ ID NO: 51171 - protein, 22 aa, Homo sapiens
CARDGRSYYDSSGRRENYFDYW

SEQ ID NO: 51172 - protein, 18 aa, Homo sapiens
CVRDLLYYGSGVNWFDPW

SEQ ID NO: 51173 - protein, 19 aa, Homo sapiens
CARLDGYYDSSGYYYFDYW

SEQ ID NO: 51174 - protein, 14 aa, Homo sapiens
CATTLGELSSFDYW

SEQ ID NO: 51175 - protein, 18 aa, Homo sapiens
CASRRPAYCGGDCYSDYW

SEQ ID NO: 51176 - protein, 14 aa, Homo sapiens
CASEDVLTGCFDYW

SEQ ID NO: 51177 - protein, 21 aa, Homo sapiens
CARGEGYCSSTSCSYWYFDLW

SEQ ID NO: 51178 - protein, 18 aa, Homo sapiens
CAKDRTDYGDYGNEFDYW

SEQ ID NO: 51179 - protein, 20 aa, Homo sapiens
CARGRPQQRFLFSYYYMDVW

SEQ ID NO: 51180 - protein, 21 aa, Homo sapiens
CARRGVTIFGVGTISGAFDIW

SEQ ID NO: 51181 - protein, 19 aa, Homo sapiens
CATAPPYYGDRPRIWFDPW

SEQ ID NO: 51182 - protein, 13 aa, Homo sapiens
CAKDLGILRIDYW

SEQ ID NO: 51183 - protein, 21 aa, Homo sapiens
CATYFLDTYYDSSGVNAFDIW

SEQ ID NO: 51184 - protein, 21 aa, Homo sapiens
CARGYYYYDSSGYYYDQFDYW

SEQ ID NO: 51185 - protein, 24 aa, Homo sapiens
CARDRSEYCSDITCSFLEGYFDLW

SEQ ID NO: 51186 - protein, 25 aa, Homo sapiens
CAREGHYDILTGLGITNYYYYMDVW

SEQ ID NO: 51187 - protein, 17 aa, Homo sapiens
CAKAAVNDDYGDFFDYW

SEQ ID NO: 51188 - protein, 21 aa, Homo sapiens
CARDGGDYDFWSGYYMGLDYW

SEQ ID NO: 51189 - protein, 18 aa, Homo sapiens
CASPLRWYSGYDYVFDYW

SEQ ID NO: 51190 - protein, 17 aa, Homo sapiens
CATASPHWNSGGWFDPW

SEQ ID NO: 51191 - protein, 24 aa, Homo sapiens
CARVNIGSSGSLLIPAYYYGMDVW

SEQ ID NO: 51192 - protein, 21 aa, Homo sapiens
CARDPTIPHDKTGTYYYMDVW

SEQ ID NO: 51193 - protein, 21 aa, Homo sapiens
CAKDLDYYDSSGYYGDAFDIW

SEQ ID NO: 51194 - protein, 18 aa, Homo sapiens
CAKLGYCSSTSCSAGDYW

SEQ ID NO: 51195 - protein, 19 aa, Homo sapiens
CAKDYTSGYSSTWYFFDYW

SEQ ID NO: 51196 - protein, 20 aa, Homo sapiens
CATETTGGVWMGRHYYMDVW

SEQ ID NO: 51197 - protein, 15 aa, Homo sapiens
CARGPAYSYGIIDYW

SEQ ID NO: 51198 - protein, 24 aa, Homo sapiens
CAREGTYYDYIWGSYRFNPLFDYW

SEQ ID NO: 51199 - protein, 23 aa, Homo sapiens
CARNFIDYGDYFSLVVATPIDYW

SEQ ID NO: 51200 - protein, 21 aa, Homo sapiens
CARDLSIAAADYYYYYGMDVW

SEQ ID NO: 51201 - protein, 28 aa, Homo sapiens
CARLPVAPTHEYDYIWGSYPPRAAFDIW

SEQ ID NO: 51202 - protein, 17 aa, Homo sapiens
CAKTDRPHDYGDSFDYW

SEQ ID NO: 51203 - protein, 24 aa, Homo sapiens
CARRAGAGKYCSGGSCYSRLLDYW

SEQ ID NO: 51204 - protein, 19 aa, Homo sapiens
CAREPGSSGYYYGHFDDYW

SEQ ID NO: 51205 - protein, 18 aa, Homo sapiens
CARAPYCGGDCYGAFDIW

SEQ ID NO: 51206 - protein, 18 aa, Homo sapiens
CAKIAAQYYYYYYGMDVW

SEQ ID NO: 51207 - protein, 20 aa, Homo sapiens
CARVKDETAITKVAWYFDLW

SEQ ID NO: 51208 - protein, 19 aa, Homo sapiens
CTRVQINDYGDYVSAFDIW

SEQ ID NO: 51209 - protein, 20 aa, Homo sapiens
CTTDGKASYDFWSGYYKHYW

SEQ ID NO: 51210 - protein, 20 aa, Homo sapiens
CVRVSNKPAGRGYYYGMDVW

SEQ ID NO: 51211 - protein, 18 aa, Homo sapiens
CASWRYYYDSSGRYFDYW

SEQ ID NO: 51212 - protein, 18 aa, Homo sapiens
CASQGFYYYGSGTYGGYW

SEQ ID NO: 51213 - protein, 17 aa, Homo sapiens
CARDQEAGAIRYRFDCW

SEQ ID NO: 51214 - protein, 19 aa, Homo sapiens
CARLVGRYSSGWLWYFDLW

SEQ ID NO: 51215 - protein, 17 aa, Homo sapiens
CAHRLLLIAIPPSFDPW

SEQ ID NO: 51216 - protein, 21 aa, Homo sapiens
CAGEEAIWVADLLPHGWFDPW

SEQ ID NO: 51217 - protein, 16 aa, Homo sapiens
CARGPPVGVAGPLDYW

SEQ ID NO: 51218 - protein, 18 aa, Homo sapiens
CARQMNGGIVEYNWFDPW

SEQ ID NO: 51219 - protein, 17 aa, Homo sapiens
CARDIVGYDILTGLDYW

SEQ ID NO: 51220 - protein, 16 aa, Homo sapiens
CARRGRRDGYDCLDYW

SEQ ID NO: 51221 - protein, 19 aa, Homo sapiens
CARGLDIMVQADDGAFDIW

SEQ ID NO: 51222 - protein, 21 aa, Homo sapiens
CARARNYDFWSDKPWGYMDVW

SEQ ID NO: 51223 - protein, 19 aa, Homo sapiens
CAKDGELGELSFSDAFDIW

SEQ ID NO: 51224 - protein, 16 aa, Homo sapiens
CARRGSSGLYSYFDPW

SEQ ID NO: 51225 - protein, 17 aa, Homo sapiens
CAHKSGSVGARDDFDYW

SEQ ID NO: 51226 - protein, 19 aa, Homo sapiens
CTREADYYDSSGHPLFDYW

SEQ ID NO: 51227 - protein, 19 aa, Homo sapiens
CTRPLETGYYSGDYYFDYW

SEQ ID NO: 51228 - protein, 28 aa, Homo sapiens
CARDLPPLHLGELSLARYYYYYYGMDVW

SEQ ID NO: 51229 - protein, 26 aa, Homo sapiens
CARDPRHFYDFWSGYGYYYYYGMDVW

SEQ ID NO: 51230 - protein, 27 aa, Homo sapiens
CARDRALAFPTGGQGHNPHSANWFDPW

SEQ ID NO: 51231 - protein, 20 aa, Homo sapiens
CAGRILSLAYDSSGSGFDPW

SEQ ID NO: 51232 - protein, 21 aa, Homo sapiens
CAREEAGYSSSWSGGGTFDIW

SEQ ID NO: 51233 - protein, 13 aa, Homo sapiens
CARAYDTSGRDYW

SEQ ID NO: 51234 - protein, 19 aa, Homo sapiens
CARERPDAKRWLQSYFDYW

SEQ ID NO: 51235 - protein, 20 aa, Homo sapiens
CARTLYYYGSGSYYNCFDYW

SEQ ID NO: 51236 - protein, 23 aa, Homo sapiens
CANADFWSGYYAPYYYYYGMDVW

SEQ ID NO: 51237 - protein, 24 aa, Homo sapiens
CARDAGYDADVFFGVVIIGWFDPW

SEQ ID NO: 51238 - protein, 19 aa, Homo sapiens
CAREGYFPLGYYYYGMDVW

SEQ ID NO: 51239 - protein, 17 aa, Homo sapiens
CAFSSGLVIIGHYMDVW

SEQ ID NO: 51240 - protein, 18 aa, Homo sapiens
CARFRWGDDYSNYGYDYW

SEQ ID NO: 51241 - protein, 21 aa, Homo sapiens
CAREVEDYYGSGSYDYYMDVW

SEQ ID NO: 51242 - protein, 20 aa, Homo sapiens
CARGSRYCTGGVCYPYFDYW

SEQ ID NO: 51243 - protein, 19 aa, Homo sapiens
CASRYCSSTSCPSPQIDYW

SEQ ID NO: 51244 - protein, 17 aa, Homo sapiens
CAREPVARARVDAFDIW

SEQ ID NO: 51245 - protein, 18 aa, Homo sapiens
CGRTDFWSGYGTPVLDYW

SEQ ID NO: 51246 - protein, 23 aa, Homo sapiens
CAKDDNVGLVLAAVITTGSYDYW

SEQ ID NO: 51247 - protein, 23 aa, Homo sapiens
CARDLNTYYDFWSGYYTGWFDPW

SEQ ID NO: 51248 - protein, 17 aa, Homo sapiens
CASHADVDIVATSYDYW

SEQ ID NO: 51249 - protein, 21 aa, Homo sapiens
CARIVPTIFGFVIHSYYFDYW

SEQ ID NO: 51250 - protein, 17 aa, Homo sapiens
CARATGYILTGYYLDYW

SEQ ID NO: 51251 - protein, 25 aa, Homo sapiens
CARDHVVPDYGSGSYYNGPNWFDPW

SEQ ID NO: 51252 - protein, 20 aa, Homo sapiens
CARWMLVVAATRPSYYFDYW

SEQ ID NO: 51253 - protein, 20 aa, Homo sapiens
CARNLLVQGVIITSNWFDPW

SEQ ID NO: 51254 - protein, 23 aa, Homo sapiens
CAWIGMDSSGWYLPDYYYGMDVW

SEQ ID NO: 51255 - protein, 27 aa, Homo sapiens
CAREDYYDNSAYDSPSAGHYYYGMDVW

SEQ ID NO: 51256 - protein, 19 aa, Homo sapiens
CARHNFRVVDGTDDGFDVW

SEQ ID NO: 51257 - protein, 23 aa, Homo sapiens
CARQGEGYCSGGNCYGRAQFDHW

SEQ ID NO: 51258 - protein, 22 aa, Homo sapiens
CARDGDDYGDLTYYYYYYMDVW

SEQ ID NO: 51259 - protein, 16 aa, Homo sapiens
CAHYASGFATSYFDYW

SEQ ID NO: 51260 - protein, 19 aa, Homo sapiens
CARDLGIAVAGTLYYFDYW

SEQ ID NO: 51261 - protein, 18 aa, Homo sapiens
CARRPPYGDWTNWYFDLW

SEQ ID NO: 51262 - protein, 21 aa, Homo sapiens
CASSNYERLGATTTQYYFDYW

SEQ ID NO: 51263 - protein, 20 aa, Homo sapiens
CARDGVYGDYENSFGAFDIW

SEQ ID NO: 51264 - protein, 18 aa, Homo sapiens
CATHIDYTREFGAAFDIW

SEQ ID NO: 51265 - protein, 23 aa, Homo sapiens
CATEGLYYDFWSGYYTSYGMDVW

SEQ ID NO: 51266 - protein, 14 aa, Homo sapiens
CASALSPAASLDYW

SEQ ID NO: 51267 - protein, 29 aa, Homo sapiens
CARGDILDSSTSWYTIFGVVTPRDAFDIW

SEQ ID NO: 51268 - protein, 19 aa, Homo sapiens
CAKDYGHCSGGSCYYFDDW

SEQ ID NO: 51269 - protein, 22 aa, Homo sapiens
CAKDRRFGVVIIDYYYYGMDVW

SEQ ID NO: 51270 - protein, 18 aa, Homo sapiens
CARDPSRTYFPTWYFELW

SEQ ID NO: 51271 - protein, 26 aa, Homo sapiens
CARDITTYCSGGSCYSYYYYYYMDVW

SEQ ID NO: 51272 - protein, 24 aa, Homo sapiens
CARSDPYYDYIWGSYRYTGAFDIW

SEQ ID NO: 51273 - protein, 23 aa, Homo sapiens
CARGGYGYGGNSGGYYYYGMDVW

SEQ ID NO: 51274 - protein, 17 aa, Homo sapiens
CARDGGVGATRFHFDPW

SEQ ID NO: 51275 - protein, 22 aa, Homo sapiens
CAREGPPGIAVAGYYYYGMDVW

SEQ ID NO: 51276 - protein, 16 aa, Homo sapiens
CAREHSGSYRSHFDYW

SEQ ID NO: 51277 - protein, 15 aa, Homo sapiens
CARDNYGDFTLGDYW

SEQ ID NO: 51278 - protein, 22 aa, Homo sapiens
CARGGNWNGQQRYYYYYYMDVW

SEQ ID NO: 51279 - protein, 22 aa, Homo sapiens
CARILPDYEPSPDYYYYGMDVW

SEQ ID NO: 51280 - protein, 16 aa, Homo sapiens
CAHRRSLLGILWFDPW

SEQ ID NO: 51281 - protein, 22 aa, Homo sapiens
CATSYDYIWDAHTRYYYGMDVW

SEQ ID NO: 51282 - protein, 25 aa, Homo sapiens
CARLLTAAGYCGGDCYGEYNWFDPW

SEQ ID NO: 51283 - protein, 27 aa, Homo sapiens
CARTHIHYYDILTGYFRPPTTYYMDVW

SEQ ID NO: 51284 - protein, 25 aa, Homo sapiens
CARHPSIAAGSSLRNYYYYYGMDVW

SEQ ID NO: 51285 - protein, 19 aa, Homo sapiens
CATGFRHSRIAVPAPLDYW

SEQ ID NO: 51286 - protein, 19 aa, Homo sapiens
CAKGGTTVTTVEPSYFDYW

SEQ ID NO: 51287 - protein, 18 aa, Homo sapiens
CARDPPNTVTMNYYMDVW

SEQ ID NO: 51288 - protein, 24 aa, Homo sapiens
CARESRAITIFGVETYYYYGMDVW

SEQ ID NO: 51289 - protein, 20 aa, Homo sapiens
CARAPGMIVVVSGPSAFDIW

SEQ ID NO: 51290 - protein, 19 aa, Homo sapiens
CAREGYSGYDSYLNMIDYW

SEQ ID NO: 51291 - protein, 17 aa, Homo sapiens
CARTDAGYPYYYYMDVW

SEQ ID NO: 51292 - protein, 19 aa, Homo sapiens
CAKDAVPAINWGAYYFDYW

SEQ ID NO: 51293 - protein, 26 aa, Homo sapiens
CARDAPTGEPLVTIFGVVIIGYFDYW

SEQ ID NO: 51294 - protein, 26 aa, Homo sapiens
CARSGSDYYDSSGYYFHYYYYYMDVW

SEQ ID NO: 51295 - protein, 16 aa, Homo sapiens
CAHRAPSWIGPGFDPW

SEQ ID NO: 51296 - protein, 19 aa, Homo sapiens
CARTDYYGDYEYQGWFDPW

SEQ ID NO: 51297 - protein, 17 aa, Homo sapiens
CARDIPLDSSWPLVDYW

SEQ ID NO: 51298 - protein, 18 aa, Homo sapiens
CARDEGYSSGWYLVFDYW

SEQ ID NO: 51299 - protein, 18 aa, Homo sapiens
CARDSQPGGYYYYYMDVW

SEQ ID NO: 51300 - protein, 21 aa, Homo sapiens
CARGPPQDIVVVVAENWFDPW

SEQ ID NO: 51301 - protein, 15 aa, Homo sapiens
CARFLGGGVRYFDYW

SEQ ID NO: 51302 - protein, 16 aa, Homo sapiens
CAIVESLNYGDDFDIW

SEQ ID NO: 51303 - protein, 24 aa, Homo sapiens
CARGSRNPYDFWSDNQGGGAFDIW

SEQ ID NO: 51304 - protein, 17 aa, Homo sapiens
CAREYYDPSYQNAFDIW

SEQ ID NO: 51305 - protein, 19 aa, Homo sapiens
CARRDLVPAAMTPEYMDVW

SEQ ID NO: 51306 - protein, 18 aa, Homo sapiens
CAREDYGGNSVEWYFDLW

SEQ ID NO: 51307 - protein, 18 aa, Homo sapiens
CVMETLTTDYFYSYMDVW

SEQ ID NO: 51308 - protein, 20 aa, Homo sapiens
CARDLGRNDFWSGNNWFDPW

SEQ ID NO: 51309 - protein, 24 aa, Homo sapiens
CARAPTYYDFWSGYSYASPPYDYW

SEQ ID NO: 51310 - protein, 21 aa, Homo sapiens
CARWGYGSGSLNGAYPLYDYW

SEQ ID NO: 51311 - protein, 20 aa, Homo sapiens
CARDFRYCSSTSCLNYFDYW

SEQ ID NO: 51312 - protein, 20 aa, Homo sapiens
CATSTVVVVPAAPSGWFDPW

SEQ ID NO: 51313 - protein, 24 aa, Homo sapiens
CARWMDLDRGYSDYRTRGYYFDYW

SEQ ID NO: 51314 - protein, 18 aa, Homo sapiens
CAKNGDPYDSSGYYFRYW

SEQ ID NO: 51315 - protein, 26 aa, Homo sapiens
CAKDGPYYDILTALVGDYYYYYMDVW

SEQ ID NO: 51316 - protein, 22 aa, Homo sapiens
CARRVAVAGIMGWDYYYYMDVW

SEQ ID NO: 51317 - protein, 15 aa, Homo sapiens
CARPYSSSWSTFGYW

SEQ ID NO: 51318 - protein, 23 aa, Homo sapiens
CAREAAYDSSGYYSENYYYFDYW

SEQ ID NO: 51319 - protein, 17 aa, Homo sapiens
CAKGGTMVPTDWYFDLW

SEQ ID NO: 51320 - protein, 25 aa, Homo sapiens
CARDLRRGTIFGVVTHNYYYYMDVW

SEQ ID NO: 51321 - protein, 17 aa, Homo sapiens
CATASPYGDSGRWFDPW

SEQ ID NO: 51322 - protein, 23 aa, Homo sapiens
CARHGPYYYDSSGYWRLDWFDPW

SEQ ID NO: 51323 - protein, 19 aa, Homo sapiens
CARSVYGDYEGRGDAFDVW

SEQ ID NO: 51324 - protein, 17 aa, Homo sapiens
CAHLPVRWFRESPFDYW

SEQ ID NO: 51325 - protein, 24 aa, Homo sapiens
CAREEDLNCSGGSCYSYGYGMDVW

SEQ ID NO: 51326 - protein, 25 aa, Homo sapiens
CARDQLTNYYDSSGSTYGEYYFDYW

SEQ ID NO: 51327 - protein, 18 aa, Homo sapiens
CARDLGGQWLGENGFDYW

SEQ ID NO: 51328 - protein, 22 aa, Homo sapiens
CARIILGYCSSTSCYGAWFDPW

SEQ ID NO: 51329 - protein, 15 aa, Homo sapiens
CAKDGGSNLDWFDPW

SEQ ID NO: 51330 - protein, 15 aa, Homo sapiens
CARPGGDIHEHVDYW

SEQ ID NO: 51331 - protein, 26 aa, Homo sapiens
CARGFWRRGIDPRSVGRYYYYGMDVW

SEQ ID NO: 51332 - protein, 19 aa, Homo sapiens
CARNTDDYGDYSSPDFDYW

SEQ ID NO: 51333 - protein, 20 aa, Homo sapiens
CARDWAESGIAVAGYGFDPW

SEQ ID NO: 51334 - protein, 14 aa, Homo sapiens
CARDLSTIGYLDLW

SEQ ID NO: 51335 - protein, 18 aa, Homo sapiens
CASARSDYGGGWSGLDYW

SEQ ID NO: 51336 - protein, 16 aa, Homo sapiens
CVRPRTEQLVDAFDIW

SEQ ID NO: 51337 - protein, 17 aa, Homo sapiens
CARDPDPSRYVVGFDCW

SEQ ID NO: 51338 - protein, 19 aa, Homo sapiens
CARDLDSSSSVHNNWFDPW

SEQ ID NO: 51339 - protein, 16 aa, Homo sapiens
CARVLSEGAGWYFDLW

SEQ ID NO: 51340 - protein, 24 aa, Homo sapiens
CARWGYYDSSGYYYGQGNGTFDYW

SEQ ID NO: 51341 - protein, 20 aa, Homo sapiens
CARTEIPPGGYSSSWSLDYW

SEQ ID NO: 51342 - protein, 25 aa, Homo sapiens
CATAPAAPNYDYIWGSYRFSWFDPW

SEQ ID NO: 51343 - protein, 22 aa, Homo sapiens
CARSEDIVVVIAANLLGYFDYW

SEQ ID NO: 51344 - protein, 25 aa, Homo sapiens
CARAIQESDIVLVVYAPGDDAFDIW

SEQ ID NO: 51345 - protein, 26 aa, Homo sapiens
CARDTDPLPPWDRYYDSSGLGYFDYW

SEQ ID NO: 51346 - protein, 19 aa, Homo sapiens
CARVNTGTPPIYYYYMDVW

SEQ ID NO: 51347 - protein, 21 aa, Homo sapiens
CATEDGARLPGSYYYYYMDVW

SEQ ID NO: 51348 - protein, 14 aa, Homo sapiens
CARTLRDGFAIDYW

SEQ ID NO: 51349 - protein, 18 aa, Homo sapiens
CAREVLSSGWHESHFDYW

SEQ ID NO: 51350 - protein, 21 aa, Homo sapiens
CARDSVWFREFVGYDDAFDIW

SEQ ID NO: 51351 - protein, 21 aa, Homo sapiens
CATPLPGDFGDYWRSDAFDIW

SEQ ID NO: 51352 - protein, 18 aa, Homo sapiens
CARLEHFLEGIGHWFDPW

SEQ ID NO: 51353 - protein, 23 aa, Homo sapiens
CARFASYEELAVAGYYYYGMDVW

SEQ ID NO: 51354 - protein, 16 aa, Homo sapiens
CAREVGPVTTLPLDYW

SEQ ID NO: 51355 - protein, 31 aa, Homo sapiens
CARDGFYYDFWSGYYFSEYPTGGMNWYFDLW

SEQ ID NO: 51356 - protein, 23 aa, Homo sapiens
CAREREGDYDSSGYPAYYYMDVW

SEQ ID NO: 51357 - protein, 18 aa, Homo sapiens
CAREGGGGYNYGDAFDIW

SEQ ID NO: 51358 - protein, 26 aa, Homo sapiens
CARALHYDFWSGYDIMDYYYYYMDVW

SEQ ID NO: 51359 - protein, 23 aa, Homo sapiens
CAKTHVEHDYIWGSYRFGWFDPW

SEQ ID NO: 51360 - protein, 17 aa, Homo sapiens
CARGHDYIWGTLHFDYW

SEQ ID NO: 51361 - protein, 30 aa, Homo sapiens
CALPISAMYYCARQVVQDYDSSGYIAFDIW

SEQ ID NO: 51362 - protein, 26 aa, Homo sapiens
CARGEERYCTGGVCYNREVDSGYDYW

SEQ ID NO: 51363 - protein, 21 aa, Homo sapiens
CARRAYSGSYANYYYYGMDVW

SEQ ID NO: 51364 - protein, 21 aa, Homo sapiens
CAREGYYDSSGYRKYWYFDLW

SEQ ID NO: 51365 - protein, 16 aa, Homo sapiens
CARDSGSYTHGGFDYW

SEQ ID NO: 51366 - protein, 24 aa, Homo sapiens
CARDWPLDHIVVVPAAMSGYFDYW

SEQ ID NO: 51367 - protein, 24 aa, Homo sapiens
CARRYSEVEYYYDSSGYYYYFDYW

SEQ ID NO: 51368 - protein, 17 aa, Homo sapiens
CAKLTDSSGYYVASDYW

SEQ ID NO: 51369 - protein, 21 aa, Homo sapiens
CAKDILTGYYTHYYYYGMDVW

SEQ ID NO: 51370 - protein, 24 aa, Homo sapiens
CARTRKLDYNFRSAYTGPTDFDYW

SEQ ID NO: 51371 - protein, 19 aa, Homo sapiens
CARVPSSTVEFYYYYMDVW

SEQ ID NO: 51372 - protein, 28 aa, Homo sapiens
CARDYWKVVPAARGQRKTPSGTNWFDPW

SEQ ID NO: 51373 - protein, 16 aa, Homo sapiens
CAREVPGAHENWFDPW

SEQ ID NO: 51374 - protein, 21 aa, Homo sapiens
CARDPFHYYDSSGAGDAFDIW

SEQ ID NO: 51375 - protein, 18 aa, Homo sapiens
CARVTSAAAGKEDYFDYW

SEQ ID NO: 51376 - protein, 17 aa, Homo sapiens
CARHADIVATIVYFDYW

SEQ ID NO: 51377 - protein, 17 aa, Homo sapiens
CARERDHSPSDWYFDLW

SEQ ID NO: 51378 - protein, 19 aa, Homo sapiens
CARGDXRVPYYYYYGMDVW

SEQ ID NO: 51379 - protein, 16 aa, Homo sapiens
CARTRDRSSWSYFQDW

SEQ ID NO: 51380 - protein, 15 aa, Homo sapiens
CASSVEEWGGAFDIW

SEQ ID NO: 51381 - protein, 14 aa, Homo sapiens
CASTQWPRGWFDPW

SEQ ID NO: 51382 - protein, 28 aa, Homo sapiens
CARDPTYYDFWNQIRGGHYYYYYYMDVW

SEQ ID NO: 51383 - protein, 19 aa, Homo sapiens
CARVRGYSGYGSLYYFDYW

SEQ ID NO: 51384 - protein, 17 aa, Homo sapiens
CAKDRSSRWYSDAMDVW

SEQ ID NO: 51385 - protein, 25 aa, Homo sapiens
CAREAHPWGRYDSSGYYYPFHFDYW

SEQ ID NO: 51386 - protein, 16 aa, Homo sapiens
CARNRGSDSSDYHDYW

SEQ ID NO: 51387 - protein, 24 aa, Homo sapiens
CARDWRPYCSGGGCDSHFIGFDPW

SEQ ID NO: 51388 - protein, 17 aa, Homo sapiens
CARDMGTVTNYWYFDLW

SEQ ID NO: 51389 - protein, 20 aa, Homo sapiens
CAKLLYSSGWPSQDPNFDYW

SEQ ID NO: 51390 - protein, 19 aa, Homo sapiens
CATEYAYCGGDCYWAFDYW

SEQ ID NO: 51391 - protein, 15 aa, Homo sapiens
CAAHPWGDGQAFDYW

SEQ ID NO: 51392 - protein, 14 aa, Homo sapiens
CANLLQSGWYRDYW

SEQ ID NO: 51393 - protein, 19 aa, Homo sapiens
CARDGYSGYDNERGGFDYW

SEQ ID NO: 51394 - protein, 23 aa, Homo sapiens
CARDSPYSSGWYDMTPGRAFDIW

SEQ ID NO: 51395 - protein, 13 aa, Homo sapiens
CAHRRQLVLFDYW

SEQ ID NO: 51396 - protein, 15 aa, Homo sapiens
CARGDGHNWFSPDYW

SEQ ID NO: 51397 - protein, 20 aa, Homo sapiens
CARDLGIAVAGTPDNWFDPW

SEQ ID NO: 51398 - protein, 19 aa, Homo sapiens
CATAPGYDFHPRRNWFDPW

SEQ ID NO: 51399 - protein, 21 aa, Homo sapiens
CATYFAIRITMVQGATNFDYW

SEQ ID NO: 51400 - protein, 23 aa, Homo sapiens
CARGGDNYDILTGYPTDDAFDIW

SEQ ID NO: 51401 - protein, 10 aa, Homo sapiens
CYSAADSWIF

SEQ ID NO: 51402 - protein, 15 aa, Homo sapiens
CARKSGVWPDFFDSW

SEQ ID NO: 51403 - protein, 16 aa, Homo sapiens
CARVSDWDYYYGMDVW

SEQ ID NO: 51404 - protein, 23 aa, Homo sapiens
CARGYTNYDYIWGSYRPEAVDYW

SEQ ID NO: 51405 - protein, 16 aa, Homo sapiens
CAHRGMAVVRGSFDYW

SEQ ID NO: 51406 - protein, 21 aa, Homo sapiens
CARASLLRYFDWTRGGWFDPW

SEQ ID NO: 51407 - protein, 21 aa, Homo sapiens
CARGGWIAARPDYYYSYMDVW

SEQ ID NO: 51408 - protein, 17 aa, Homo sapiens
CARVNGDTSGGWYLDLW

SEQ ID NO: 51409 - protein, 16 aa, Homo sapiens
CAHRPSGWLGGYFDYW

SEQ ID NO: 51410 - protein, 20 aa, Homo sapiens
CARDFEAAAGNQLYWYFDLW

SEQ ID NO: 51411 - protein, 17 aa, Homo sapiens
CAHAPRNWGILFYFDYW

SEQ ID NO: 51412 - protein, 21 aa, Homo sapiens
CARRIIRITIFGVVNRAMDVW

SEQ ID NO: 51413 - protein, 20 aa, Homo sapiens
CARFNMVQGSTRYYYYMDVW

SEQ ID NO: 51414 - protein, 14 aa, Homo sapiens
CAGPLDSGSYPHYW

SEQ ID NO: 51415 - protein, 18 aa, Homo sapiens
CARIGNIWFRETYYFDYW

SEQ ID NO: 51416 - protein, 22 aa, Homo sapiens
CATAPPGGVAPTGGYYYYMDVW

SEQ ID NO: 51417 - protein, 15 aa, Homo sapiens
CARDHPQLGRAFDIW

SEQ ID NO: 51418 - protein, 15 aa, Homo sapiens
CARDLYGDYVLGDYW

SEQ ID NO: 51419 - protein, 17 aa, Homo sapiens
CAKVPSPHDYGAPNDYW

SEQ ID NO: 51420 - protein, 21 aa, Homo sapiens
CARGGYSTTQLVKKYNWFDPW

SEQ ID NO: 51421 - protein, 17 aa, Homo sapiens
CARAVVPAAVWALFDYW

SEQ ID NO: 51422 - protein, 21 aa, Homo sapiens
CAREVVGGYSSSWYRWYFDLW

SEQ ID NO: 51423 - protein, 17 aa, Homo sapiens
CARDFNGNYDIYYMDVW

SEQ ID NO: 51424 - protein, 11 aa, Homo sapiens
CQQVKSYPLNF

SEQ ID NO: 51425 - protein, 18 aa, Homo sapiens
CVVLTATIFGAQDAFDIW

SEQ ID NO: 51426 - protein, 14 aa, Homo sapiens
CARHPTVVTSTDYW

SEQ ID NO: 51427 - protein, 25 aa, Homo sapiens
CARDHRRVKMVQGIVRNYYYYMDVW

SEQ ID NO: 51428 - protein, 25 aa, Homo sapiens
CARAIRGNYDYIWGSYRDTGPFDYW

SEQ ID NO: 51429 - protein, 17 aa, Homo sapiens
CASQTGDYGDYWYFDLW

SEQ ID NO: 51430 - protein, 16 aa, Homo sapiens
CAKGIEGVVIASFDYW

SEQ ID NO: 51431 - protein, 19 aa, Homo sapiens
CARRSTIAVAGTQDYFDSW

SEQ ID NO: 51432 - protein, 19 aa, Homo sapiens
CASVAAAGTAYYYYGMDVW

SEQ ID NO: 51433 - protein, 21 aa, Homo sapiens
CATVVTYYYDSSGYSYYFDYW

SEQ ID NO: 51434 - protein, 17 aa, Homo sapiens
CASSNFDYGSGSSLDYW

SEQ ID NO: 51435 - protein, 20 aa, Homo sapiens
CARDQGDVVVIAPSLSFDYW

SEQ ID NO: 51436 - protein, 19 aa, Homo sapiens
CARERPQEDYYYYYYMDVW

SEQ ID NO: 51437 - protein, 19 aa, Homo sapiens
CARVGPNYNTGYYSHLDYW

SEQ ID NO: 51438 - protein, 26 aa, Homo sapiens
CARYRWGDIVVVPAARDYYYYGMDVW

SEQ ID NO: 51439 - protein, 23 aa, Homo sapiens
CARNSGDILTGSGLYYYYYMDVW

SEQ ID NO: 51440 - protein, 18 aa, Homo sapiens
CARDGDNVWGSYRHIDYW

SEQ ID NO: 51441 - protein, 21 aa, Homo sapiens
CAYRGGSSWIKLWLDGWFDPW

SEQ ID NO: 51442 - protein, 17 aa, Homo sapiens
CARDDMSGWYFGFGDYW

SEQ ID NO: 51443 - protein, 17 aa, Homo sapiens
CASGQWLVSNYFYLDVW

SEQ ID NO: 51444 - protein, 20 aa, Homo sapiens
CAREIEVWGEVIPYNWFDPW

SEQ ID NO: 51445 - protein, 16 aa, Homo sapiens
CARSSIAALEYYFDYW

SEQ ID NO: 51446 - protein, 17 aa, Homo sapiens
CASSSQEGWYYYGMDVW

SEQ ID NO: 51447 - protein, 18 aa, Homo sapiens
CAKLPHPNYYDSSNTDYW

SEQ ID NO: 51448 - protein, 12 aa, Homo sapiens
CATYGSGSFRYW

SEQ ID NO: 51449 - protein, 22 aa, Homo sapiens
CARDAGYCSGGSCYRYYGMDVW

SEQ ID NO: 51450 - protein, 15 aa, Homo sapiens
CARENESGRGAFDIW

SEQ ID NO: 51451 - protein, 18 aa, Homo sapiens
CARSSSWYNTPLYYFDYW

SEQ ID NO: 51452 - protein, 18 aa, Homo sapiens
CVRKILGYCSGSNCPDYW

SEQ ID NO: 51453 - protein, 19 aa, Homo sapiens
CARDTSVGEFNYYYGMDVW

SEQ ID NO: 51454 - protein, 17 aa, Homo sapiens
CARGRQWLGPDDAFDIW

SEQ ID NO: 51455 - protein, 19 aa, Homo sapiens
CARVVTIFGVVRDWYFDLW

SEQ ID NO: 51456 - protein, 21 aa, Homo sapiens
CARDLVETTSQYYYYYGMDVW

SEQ ID NO: 51457 - protein, 14 aa, Homo sapiens
CVREVGHTVSFDYW

SEQ ID NO: 51458 - protein, 27 aa, Homo sapiens
CARGTQYCSGGSCYPRTYYYYYYMDVW

SEQ ID NO: 51459 - protein, 21 aa, Homo sapiens
CARDQGDYGDYGYYYYYMDVW

SEQ ID NO: 51460 - protein, 22 aa, Homo sapiens
CARDFRNYDFWSGYSIGPFDYW

SEQ ID NO: 51461 - protein, 19 aa, Homo sapiens
CARDLGDGYNYHYYYMDVW

SEQ ID NO: 51462 - protein, 18 aa, Homo sapiens
CASSYCSSTDCYGGIDYW

SEQ ID NO: 51463 - protein, 15 aa, Homo sapiens
CVTPEGRTWFAFDLW

SEQ ID NO: 51464 - protein, 17 aa, Homo sapiens
CARGDGYDNYYYGMDVW

SEQ ID NO: 51465 - protein, 30 aa, Homo sapiens
CARDSPTYYDFWSGYYAGMDYYYYYGMDVW

SEQ ID NO: 51466 - protein, 20 aa, Homo sapiens
CATGTPFYGDGYNANWFDPW

SEQ ID NO: 51467 - protein, 21 aa, Homo sapiens
CARDWSFCSGGSCYSRLFDYW

SEQ ID NO: 51468 - protein, 20 aa, Homo sapiens
CARDIPLLAVAGTHDAFDIW

SEQ ID NO: 51469 - protein, 19 aa, Homo sapiens
CARTDYYDSSGPVITFDYW

SEQ ID NO: 51470 - protein, 17 aa, Homo sapiens
CARDRVWNSGYDSGDYW

SEQ ID NO: 51471 - protein, 16 aa, Homo sapiens
CARLQYRGGGHCADYW

SEQ ID NO: 51472 - protein, 22 aa, Homo sapiens
CARDFDGPARGYYYYYYYMDVW

SEQ ID NO: 51473 - protein, 23 aa, Homo sapiens
CARVRLGATNWERNYYYYYMDVW

SEQ ID NO: 51474 - protein, 18 aa, Homo sapiens
CAREDDYYDFWSGYPDYW

SEQ ID NO: 51475 - protein, 24 aa, Homo sapiens
CARGTHCSSTSCYDYYYYYGMDVW

SEQ ID NO: 51476 - protein, 18 aa, Homo sapiens
CAGDTITISDYYYYMDVW

SEQ ID NO: 51477 - protein, 22 aa, Homo sapiens
CARSHLEPFWGSYRYPYYFDYW

SEQ ID NO: 51478 - protein, 18 aa, Homo sapiens
CAKLGVDYYDSSGYSDYW

SEQ ID NO: 51479 - protein, 22 aa, Homo sapiens
CALRGFCSRTTCFGGAYHFDNW

SEQ ID NO: 51480 - protein, 16 aa, Homo sapiens
CARGPIGAVAGNYDYW

SEQ ID NO: 51481 - protein, 27 aa, Homo sapiens
CARDSYYYGSGSYYNGEWDYYYGMDVW

SEQ ID NO: 51482 - protein, 20 aa, Homo sapiens
CARVYYDSSGYYYPGAFDIW

SEQ ID NO: 51483 - protein, 15 aa, Homo sapiens
CARVAFFTVTHFDYW

SEQ ID NO: 51484 - protein, 20 aa, Homo sapiens
CAKDYDYGEPYYYYYGMDVW

SEQ ID NO: 51485 - protein, 14 aa, Homo sapiens
CTRATLGRDAFDIW

SEQ ID NO: 51486 - protein, 22 aa, Homo sapiens
CAKVSSIAVAGTIQPENYFDYW

SEQ ID NO: 51487 - protein, 21 aa, Homo sapiens
CAREDCTGGVCYTEPGWFDPW

SEQ ID NO: 51488 - protein, 12 aa, Homo sapiens
CQTADSSDAWVF

SEQ ID NO: 51489 - protein, 15 aa, Homo sapiens
CATGIFGVVMKIDYW

SEQ ID NO: 51490 - protein, 17 aa, Homo sapiens
CAKLPSLGGYDYNRDYW

SEQ ID NO: 51491 - protein, 22 aa, Homo sapiens
CARVPSSYDFWSGYYTYYMDVW

SEQ ID NO: 51492 - protein, 20 aa, Homo sapiens
CARSRRDGYSHYYYYGMDVW

SEQ ID NO: 51493 - protein, 23 aa, Homo sapiens
CAKDFTYYDFWSGSYGDYYFDYW

SEQ ID NO: 51494 - protein, 23 aa, Homo sapiens
CARSNIYYDFWSGQDYYYYMDVW

SEQ ID NO: 51495 - protein, 14 aa, Homo sapiens
CAGGPNPFSWFDPW

SEQ ID NO: 51496 - protein, 14 aa, Homo sapiens
CAGLSAVTHAFDAW

SEQ ID NO: 51497 - protein, 26 aa, Homo sapiens
CARGYCSSTSCPDVATPYYYYYMDVW

SEQ ID NO: 51498 - protein, 16 aa, Homo sapiens
CARVGSPRYSRSFDYW

SEQ ID NO: 51499 - protein, 23 aa, Homo sapiens
CAKDFMFYYYDSSGYYPNPFDYW

SEQ ID NO: 51500 - protein, 18 aa, Homo sapiens
CAREGIAVAAIADAFDIW

SEQ ID NO: 51501 - protein, 17 aa, Homo sapiens
CARDDSMKWELLGDDYW

SEQ ID NO: 51502 - protein, 16 aa, Homo sapiens
CARCIGTPGTFGFDIW

SEQ ID NO: 51503 - protein, 17 aa, Homo sapiens
CAKLTNYYDSSGGVDYW

SEQ ID NO: 51504 - protein, 22 aa, Homo sapiens
CARNSRSGYYAHYYYYYVMDVW

SEQ ID NO: 51505 - protein, 15 aa, Homo sapiens
CTLIHSYYDFWNDYW

SEQ ID NO: 51506 - protein, 17 aa, Homo sapiens
CARADLSGYRRYYFDYW

SEQ ID NO: 51507 - protein, 14 aa, Homo sapiens
CAIFPKGPGGFDIW

SEQ ID NO: 51508 - protein, 18 aa, Homo sapiens
CAKDHENSGSYGDYFDYW

SEQ ID NO: 51509 - protein, 18 aa, Homo sapiens
CASAKGGLTGTKYYFDYW

SEQ ID NO: 51510 - protein, 22 aa, Homo sapiens
CARTQVQSTRPGIYYYYGMDVW

SEQ ID NO: 51511 - protein, 25 aa, Homo sapiens
CAREKWSDYGSGSYYTTHRGLFDYW

SEQ ID NO: 51512 - protein, 20 aa, Homo sapiens
CARSGGPHGSSPAGNWFDPW

SEQ ID NO: 51513 - protein, 18 aa, Homo sapiens
CARGPYGSGSYYKRFDYW

SEQ ID NO: 51514 - protein, 21 aa, Homo sapiens
CARGGCSSTSCYGESSPLDYW

SEQ ID NO: 51515 - protein, 18 aa, Homo sapiens
CAKILGGFDGYNYYVDYW

SEQ ID NO: 51516 - protein, 21 aa, Homo sapiens
CARDLGIDIVVVPAGGRFDYW

SEQ ID NO: 51517 - protein, 21 aa, Homo sapiens
CARDYPYDCSSTSCPSPFDYW

SEQ ID NO: 51518 - protein, 23 aa, Homo sapiens
CARDPTLTTVTTSYYYYYYMDVW

SEQ ID NO: 51519 - protein, 20 aa, Homo sapiens
CARDFGSGGYLTKDDAFDVW

SEQ ID NO: 51520 - protein, 13 aa, Homo sapiens
CAKVHSGWFFDYW

SEQ ID NO: 51521 - protein, 18 aa, Homo sapiens
CARETTVTTWVGYYFDYW

SEQ ID NO: 51522 - protein, 21 aa, Homo sapiens
CARGGTTVTTGLHYYYAMDVW

SEQ ID NO: 51523 - protein, 13 aa, Homo sapiens
CARDSPSMGFDIW

SEQ ID NO: 51524 - protein, 16 aa, Homo sapiens
CTRAADPTRIVDFDIW

SEQ ID NO: 51525 - protein, 19 aa, Homo sapiens
CARDKTGRDGYPVEVFDIW

SEQ ID NO: 51526 - protein, 16 aa, Homo sapiens
CATIGSGSYALAFDIW

SEQ ID NO: 51527 - protein, 21 aa, Homo sapiens
CATSSPFWNYKAGKGYWFDPW

SEQ ID NO: 51528 - protein, 24 aa, Homo sapiens
CARIWNSEITIFGVVIPRDYFDYW

SEQ ID NO: 51529 - protein, 16 aa, Homo sapiens
CARDPHMTTVTYLGYW

SEQ ID NO: 51530 - protein, 23 aa, Homo sapiens
CARAPHYYDSSGYYRYDNWFDPW

SEQ ID NO: 51531 - protein, 16 aa, Homo sapiens
CARQNPDYGDYSSDYW

SEQ ID NO: 51532 - protein, 22 aa, Homo sapiens
CARVRIARYYGSGVTHRWFDPW

SEQ ID NO: 51533 - protein, 16 aa, Homo sapiens
CAKLYCSGGSCHNDYW

SEQ ID NO: 51534 - protein, 25 aa, Homo sapiens
CASGSSRYCSGGSCYFNGADAFDIW

SEQ ID NO: 51535 - protein, 15 aa, Homo sapiens
CARGGTSDYYNFDYW

SEQ ID NO: 51536 - protein, 16 aa, Homo sapiens
CAHRRTWSYGGDYDYW

SEQ ID NO: 51537 - protein, 22 aa, Homo sapiens
CARELHVDTAITYYYYYYMDVW

SEQ ID NO: 51538 - protein, 24 aa, Homo sapiens
CARDRTEPYYDFWSGYYTNWFDPW

SEQ ID NO: 51539 - protein, 15 aa, Homo sapiens
CTRNDFWSGYYFDYW

SEQ ID NO: 51540 - protein, 15 aa, Homo sapiens
CARDIQESGWSFDYW

SEQ ID NO: 51541 - protein, 14 aa, Homo sapiens
CASSETYPSSFQYW

SEQ ID NO: 51542 - protein, 19 aa, Homo sapiens
CARDEGYCSSTSCATVDYW

SEQ ID NO: 51543 - protein, 17 aa, Homo sapiens
CARSYYYDTTKRAFDIW

SEQ ID NO: 51544 - protein, 17 aa, Homo sapiens
CAEGYSSSWYEGGFDYW

SEQ ID NO: 51545 - protein, 15 aa, Homo sapiens
CTSVWEPKYDAFDIW

SEQ ID NO: 51546 - protein, 23 aa, Homo sapiens
CARSTGTAAYGDYDEIGWYFDLW

SEQ ID NO: 51547 - protein, 19 aa, Homo sapiens
CVRRLRKSSMHYLYAMDVW

SEQ ID NO: 51548 - protein, 19 aa, Homo sapiens
CAITNPNDYGDYHPPLDYW

SEQ ID NO: 51549 - protein, 21 aa, Homo sapiens
CARGHDILTSYYPAYYYMDVW

SEQ ID NO: 51550 - protein, 24 aa, Homo sapiens
CARDDYDILTGYFRHPPYNWFDPW

SEQ ID NO: 51551 - protein, 21 aa, Homo sapiens
CAKSAVAGTRAYYYYYYMDVW

SEQ ID NO: 51552 - protein, 19 aa, Homo sapiens
CARVDCSSTSCLYYSFDYW

SEQ ID NO: 51553 - protein, 28 aa, Homo sapiens
CATGGFRVDYDYIWGSYRTSTYNWFDPW

SEQ ID NO: 51554 - protein, 19 aa, Homo sapiens
CAMALRSGWKESLNAFDIW

SEQ ID NO: 51555 - protein, 22 aa, Homo sapiens
CARDPTDDYDFWSGYYYGMDVW

SEQ ID NO: 51556 - protein, 21 aa, Homo sapiens
CARGLEVLWFRDPPVRWFDPW

SEQ ID NO: 51557 - protein, 15 aa, Homo sapiens
CARITVFGDSFFDHW

SEQ ID NO: 51558 - protein, 14 aa, Homo sapiens
CATFWSGYHQNDYW

SEQ ID NO: 51559 - protein, 15 aa, Homo sapiens
CARSSTGRQGLFDFW

SEQ ID NO: 51560 - protein, 21 aa, Homo sapiens
CARSGGHEGSSWQRYNWFDPW

SEQ ID NO: 51561 - protein, 15 aa, Homo sapiens
CVRDGSGSYGYFDYW

SEQ ID NO: 51562 - protein, 20 aa, Homo sapiens
CATGPAITMVQGGWGWFDPW

SEQ ID NO: 51563 - protein, 21 aa, Homo sapiens
CARHSAYGDYFPLPDNWFDPW

SEQ ID NO: 51564 - protein, 18 aa, Homo sapiens
CARDLGTSGHYYYYMDVW

SEQ ID NO: 51565 - protein, 26 aa, Homo sapiens
CAREVDSYDYIWGSYRSTPYYYMDVW

SEQ ID NO: 51566 - protein, 19 aa, Homo sapiens
CARLLLRVDIAEYNWFDPW

SEQ ID NO: 51567 - protein, 23 aa, Homo sapiens
CAKELGVSDFWSGYLVWDGMDVW

SEQ ID NO: 51568 - protein, 16 aa, Homo sapiens
CARGGGSYGDYLVDYW

SEQ ID NO: 51569 - protein, 27 aa, Homo sapiens
CARGIADLGSDDVLLWFRDPINWFDPW

SEQ ID NO: 51570 - protein, 21 aa, Homo sapiens
CARDYLRFVGDVVVPAALDYW

SEQ ID NO: 51571 - protein, 18 aa, Homo sapiens
CARRVLGWEEDYYYMDVW

SEQ ID NO: 51572 - protein, 16 aa, Homo sapiens
CAREAGYNAFDYMDVW

SEQ ID NO: 51573 - protein, 14 aa, Homo sapiens
CVGPPSPEGAFDIW

SEQ ID NO: 51574 - protein, 23 aa, Homo sapiens
CAREGRYCSSTSCYNYYYYMDVW

SEQ ID NO: 51575 - protein, 18 aa, Homo sapiens
CARAFYGDYAPLRWFDPW

SEQ ID NO: 51576 - protein, 18 aa, Homo sapiens
CARDGNYCKSSSCWFDPW

SEQ ID NO: 51577 - protein, 24 aa, Homo sapiens
CARDSPLRFLEWLSEEPHWYFDLW

SEQ ID NO: 51578 - protein, 22 aa, Homo sapiens
CARDSEFVVVPADYYYYGMDVW

SEQ ID NO: 51579 - protein, 18 aa, Homo sapiens
CTREKYYYGSGSYLGDYW

SEQ ID NO: 51580 - protein, 13 aa, Homo sapiens
CSAYTSSSPLEVF

SEQ ID NO: 51581 - protein, 18 aa, Homo sapiens
CARDHSFEGSSPNWFDPW

SEQ ID NO: 51582 - protein, 19 aa, Homo sapiens
CARLGYSSSWPHYDAFDIW

SEQ ID NO: 51583 - protein, 21 aa, Homo sapiens
CARLIGGYEFSPTIKYYFDYW

SEQ ID NO: 51584 - protein, 15 aa, Homo sapiens
CARAVAGMGGAFDVW

SEQ ID NO: 51585 - protein, 25 aa, Homo sapiens
CARERSYCSGGSCYSGYYYYGMDVW

SEQ ID NO: 51586 - protein, 22 aa, Homo sapiens
CARLGGVGATPGYYYYYGMDVW

SEQ ID NO: 51587 - protein, 31 aa, Homo sapiens
CAKDITYYDFWSGYLSPRHPAYYYYYGMDVW

SEQ ID NO: 51588 - protein, 19 aa, Homo sapiens
CARVEGYCSRISCRTFDYW

SEQ ID NO: 51589 - protein, 17 aa, Homo sapiens
CAQTHYYDSSGYYLDYW

SEQ ID NO: 51590 - protein, 19 aa, Homo sapiens
CAKLGGYDFGGGFDAFDIW

SEQ ID NO: 51591 - protein, 19 aa, Homo sapiens
CASRYCSETSCYTRAFDIW

SEQ ID NO: 51592 - protein, 17 aa, Homo sapiens
CAQIGYCSGGSCYGEYW

SEQ ID NO: 51593 - protein, 17 aa, Homo sapiens
CAVSEPFGVVTNWFDPW

SEQ ID NO: 51594 - protein, 20 aa, Homo sapiens
CARFNDYSNSAGYYYGMDVW

SEQ ID NO: 51595 - protein, 14 aa, Homo sapiens
CAHRTTVTTSFDYW

SEQ ID NO: 51596 - protein, 26 aa, Homo sapiens
CARDHLTYDFWSGLGPRPATNAFDIW

SEQ ID NO: 51597 - protein, 40 aa, Homo sapiens
CTAYLQWSSLKASDTAMYYCARVSYDILTGYSQGFWFDPW

SEQ ID NO: 51598 - protein, 20 aa, Homo sapiens
CARDATGGYCSGGSCYLDYW

SEQ ID NO: 51599 - protein, 15 aa, Homo sapiens
CYYTSSSSGYYFDYW

SEQ ID NO: 51600 - protein, 22 aa, Homo sapiens
CAREGVLAVAGTPELNDAFDIW

SEQ ID NO: 51601 - protein, 28 aa, Homo sapiens
CARSLLYYDFWSGPPSSYTYYQYGMDVW

SEQ ID NO: 51602 - protein, 23 aa, Homo sapiens
CARVHDFWSGYYTSLDPNPFDYW

SEQ ID NO: 51603 - protein, 22 aa, Homo sapiens
CARSESYYDSSGYPRSEAFDYW

SEQ ID NO: 51604 - protein, 14 aa, Homo sapiens
CARFYDIKQSFDWW

SEQ ID NO: 51605 - protein, 16 aa, Homo sapiens
CARDAAGTRDDAFDIW

SEQ ID NO: 51606 - protein, 17 aa, Homo sapiens
CARQVGATRSRDAFDIW

SEQ ID NO: 51607 - protein, 17 aa, Homo sapiens
CAHRPGYKIAAAYFDPW

SEQ ID NO: 51608 - protein, 16 aa, Homo sapiens
CARGRSYSNNWAFDYW

SEQ ID NO: 51609 - protein, 17 aa, Homo sapiens
CARDGLSGYDPEGFDYW

SEQ ID NO: 51610 - protein, 20 aa, Homo sapiens
CVREVGFKRTQYYYYGMDVW

SEQ ID NO: 51611 - protein, 15 aa, Homo sapiens
CAKFPRVVEDAFDIW

SEQ ID NO: 51612 - protein, 14 aa, Homo sapiens
CARVYPMMQAFDHW

SEQ ID NO: 51613 - protein, 17 aa, Homo sapiens
CARAWTRGDYYYYMDVW

SEQ ID NO: 51614 - protein, 16 aa, Homo sapiens
CTSDVPEYGAGEFDYW

SEQ ID NO: 51615 - protein, 27 aa, Homo sapiens
CARVLFGPKWGYCSSTSCPNAFWFDPW

SEQ ID NO: 51616 - protein, 21 aa, Homo sapiens
CAKVHVVPAAREGGNNWFDPW

SEQ ID NO: 51617 - protein, 21 aa, Homo sapiens
CATSSPYCSGGSCYSAPFDSW

SEQ ID NO: 51618 - protein, 25 aa, Homo sapiens
CAKLLLEGASFGHLGELWACWFDPW

SEQ ID NO: 51619 - protein, 20 aa, Homo sapiens
CVKWGRFCSGLSCYSAFDVW

SEQ ID NO: 51620 - protein, 23 aa, Homo sapiens
CATDAGRHIVATIWPAYYYMDVW

SEQ ID NO: 51621 - protein, 19 aa, Homo sapiens
CARVKARAWIQLWGEPDYW

SEQ ID NO: 51622 - protein, 22 aa, Homo sapiens
CARGGWSSGSGNYYYYYYMDVW

SEQ ID NO: 51623 - protein, 15 aa, Homo sapiens
CARVLEPTAKGLDYW

SEQ ID NO: 51624 - protein, 17 aa, Homo sapiens
CARDFPFEATHDQYDYW

SEQ ID NO: 51625 - protein, 17 aa, Homo sapiens
CATFAKDYYYYYYMDVW

SEQ ID NO: 51626 - protein, 17 aa, Homo sapiens
CAKLHDRSWSDDAFDIW

SEQ ID NO: 51627 - protein, 21 aa, Homo sapiens
CARDTCRASSISCYGDYLDYW

SEQ ID NO: 51628 - protein, 20 aa, Homo sapiens
CARPSLPSISMIQGQQLDYW

SEQ ID NO: 51629 - protein, 18 aa, Homo sapiens
CARDLRGSSSQPGFLDYW

SEQ ID NO: 51630 - protein, 12 aa, Homo sapiens
CASDMSGWLDYW

SEQ ID NO: 51631 - protein, 17 aa, Homo sapiens
CAREGGIAVAGQALDYW

SEQ ID NO: 51632 - protein, 28 aa, Homo sapiens
CARDDTDYDFWSGYYMASDYYYYGMDVW

SEQ ID NO: 51633 - protein, 18 aa, Homo sapiens
CARESDRYGELEHYFDYW

SEQ ID NO: 51634 - protein, 25 aa, Homo sapiens
CARDWSLPQQLITMVQGVMGWFDPW

SEQ ID NO: 51635 - protein, 24 aa, Homo sapiens
CARGSPYLGYSYEDKYYYYGMDVW

SEQ ID NO: 51636 - protein, 20 aa, Homo sapiens
CATLEYCSGGSCYFGWFDPW

SEQ ID NO: 51637 - protein, 19 aa, Homo sapiens
CARAWVDELTGKTGAFDIW

SEQ ID NO: 51638 - protein, 20 aa, Homo sapiens
CATIAGDSGGDYYYYYMDVW

SEQ ID NO: 51639 - protein, 17 aa, Homo sapiens
CARDLAPPGSGDDVDYW

SEQ ID NO: 51640 - protein, 17 aa, Homo sapiens
CAKDGKLLAYGDYFDYW

SEQ ID NO: 51641 - protein, 23 aa, Homo sapiens
CARSGPYSSSSMIYYYYYPMDVW

SEQ ID NO: 51642 - protein, 20 aa, Homo sapiens
CARDIDSASGLPTVTTRDYW

SEQ ID NO: 51643 - protein, 16 aa, Homo sapiens
CARQGSSSFSDYFDYW

SEQ ID NO: 51644 - protein, 21 aa, Homo sapiens
CAHTRYDFWSGYYHYNWFDPW

SEQ ID NO: 51645 - protein, 23 aa, Homo sapiens
CARDLHYDFWSGLAGGENWFDPW

SEQ ID NO: 51646 - protein, 18 aa, Homo sapiens
CARDPPYGDFPGEAFDIW

SEQ ID NO: 51647 - protein, 15 aa, Homo sapiens
CARDYIFSSDGTDYW

SEQ ID NO: 51648 - protein, 18 aa, Homo sapiens
CARDHYDSSGYYFLSDYW

SEQ ID NO: 51649 - protein, 23 aa, Homo sapiens
CATWIRRNPYQLFPYYYYYMDVW

SEQ ID NO: 51650 - protein, 19 aa, Homo sapiens
CASTFALELRMYYYGMDVW

SEQ ID NO: 51651 - protein, 20 aa, Homo sapiens
CAKDRGQGITGYNYYGMDVW

SEQ ID NO: 51652 - protein, 23 aa, Homo sapiens
CARTFWGSGSYSADYYYYGMDVW

SEQ ID NO: 51653 - protein, 17 aa, Homo sapiens
CARDQRIVGMTMPFDDW

SEQ ID NO: 51654 - protein, 20 aa, Homo sapiens
CARLGTYYDILTGYYGGDYW

SEQ ID NO: 51655 - protein, 20 aa, Homo sapiens
CARALVYSSSWYRALGFDPW

SEQ ID NO: 51656 - protein, 13 aa, Homo sapiens
CARSPRLREADYW

SEQ ID NO: 51657 - protein, 11 aa, Homo sapiens
CGRETAAGDYW

SEQ ID NO: 51658 - protein, 26 aa, Homo sapiens
CARDRYRYYYGSGTLTPYYYYGMDVW

SEQ ID NO: 51659 - protein, 23 aa, Homo sapiens
CARGAYYGSGSYFAPNTVLFDYW

SEQ ID NO: 51660 - protein, 13 aa, Homo sapiens
CARGYSTLAFDFW

SEQ ID NO: 51661 - protein, 26 aa, Homo sapiens
CARGSWARPYSGYNQLDYYYYGMDVW

SEQ ID NO: 51662 - protein, 24 aa, Homo sapiens
CARALWGHGDSPVGDYYYYGMDVW

SEQ ID NO: 51663 - protein, 15 aa, Homo sapiens
CASHYSGSDLWVDYW

SEQ ID NO: 51664 - protein, 25 aa, Homo sapiens
CARALRFLEWLFQPIDPYYYGMDVW

SEQ ID NO: 51665 - protein, 11 aa, Homo sapiens
CTRAVPAPDYW

SEQ ID NO: 51666 - protein, 22 aa, Homo sapiens
CASEYSSSSDHDPYYYYGMDVW

SEQ ID NO: 51667 - protein, 16 aa, Homo sapiens
CASSRDYYGSGVFDYW

SEQ ID NO: 51668 - protein, 23 aa, Homo sapiens
CARLPPPADFWSGYYPPLYFDYW

SEQ ID NO: 51669 - protein, 21 aa, Homo sapiens
CARQLGPDFWSGRSPRYFDYW

SEQ ID NO: 51670 - protein, 18 aa, Homo sapiens
CARDTYCSGGSCPAFDIW

SEQ ID NO: 51671 - protein, 30 aa, Homo sapiens
CASLFLADEPLRWLWGSGSYRGYYYGMDVW

SEQ ID NO: 51672 - protein, 19 aa, Homo sapiens
CAKETPVDIVVVVAAPDYW

SEQ ID NO: 51673 - protein, 14 aa, Homo sapiens
CARTFGEINWFDAW

SEQ ID NO: 51674 - protein, 17 aa, Homo sapiens
CASWRYDYSNDYYMDVW

SEQ ID NO: 51675 - protein, 22 aa, Homo sapiens
CARGGWLQLSYQVYYYYYMDVW

SEQ ID NO: 51676 - protein, 21 aa, Homo sapiens
CAREYCSSTSCYGQPTHFDYW

SEQ ID NO: 51677 - protein, 14 aa, Homo sapiens
CAAMGWFRGPFDYW

SEQ ID NO: 51678 - protein, 15 aa, Homo sapiens
CARGDSNNRFLHDYW

SEQ ID NO: 51679 - protein, 17 aa, Homo sapiens
CARGEGIGLRTDAFDIW

SEQ ID NO: 51680 - protein, 30 aa, Homo sapiens
CARDALPEHRTYYDFWSGYSYYYYYGMDVW

SEQ ID NO: 51681 - protein, 13 aa, Homo sapiens
CQSADSRPPTWVF

SEQ ID NO: 51682 - protein, 15 aa, Homo sapiens
CASIRMTPVTTDDYW

SEQ ID NO: 51683 - protein, 16 aa, Homo sapiens
CARDEHIVKGDAFDIW

SEQ ID NO: 51684 - protein, 20 aa, Homo sapiens
CARSATVDIVATIPDAFDIW

SEQ ID NO: 51685 - protein, 20 aa, Homo sapiens
CARGRDIVVVVTDNDPFDIW

SEQ ID NO: 51686 - protein, 18 aa, Homo sapiens
CAREGVLGDYLGPSLDYW

SEQ ID NO: 51687 - protein, 20 aa, Homo sapiens
CARISLELRLFYFYYYMDVW

SEQ ID NO: 51688 - protein, 22 aa, Homo sapiens
CAHQGATVKGGPIHYYYGMDVW

SEQ ID NO: 51689 - protein, 19 aa, Homo sapiens
CARDLKQLALQGNNWFDPW

SEQ ID NO: 51690 - protein, 26 aa, Homo sapiens
CARLEYYYDSSGYLRSLGYYYYMDVW

SEQ ID NO: 51691 - protein, 24 aa, Homo sapiens
CATGATDVSVDIVATSREYYFDHW

SEQ ID NO: 51692 - protein, 23 aa, Homo sapiens
CARDIVENYYGSGMYYYYGMDVW

SEQ ID NO: 51693 - protein, 19 aa, Homo sapiens
CTREGYDYIWGTLSAFDIW

SEQ ID NO: 51694 - protein, 19 aa, Homo sapiens
CAKDAPPFGWLVPYYFDYW

SEQ ID NO: 51695 - protein, 24 aa, Homo sapiens
CARRPGSGITIFGVVIRGGWFDPW

SEQ ID NO: 51696 - protein, 17 aa, Homo sapiens
CVKVGALYGWGYYFDYW

SEQ ID NO: 51697 - protein, 18 aa, Homo sapiens
CVKVSVVVPAAGNNFDYW

SEQ ID NO: 51698 - protein, 13 aa, Homo sapiens
CARVRFLYWFDLW

SEQ ID NO: 51699 - protein, 14 aa, Homo sapiens
CASLTVPYSGFDYW

SEQ ID NO: 51700 - protein, 20 aa, Homo sapiens
CARVLYGDDGVPVYNWFDPW

SEQ ID NO: 51701 - protein, 17 aa, Homo sapiens
CAKDSARHDILTGYDYW

SEQ ID NO: 51702 - protein, 18 aa, Homo sapiens
CATEAVYSSYNILLDDYW

SEQ ID NO: 51703 - protein, 18 aa, Homo sapiens
CVRTRYTGSYYIDAFDIW

SEQ ID NO: 51704 - protein, 26 aa, Homo sapiens
CAKEGRTRDSYHYESSGFHPLYFDSW

SEQ ID NO: 51705 - protein, 26 aa, Homo sapiens
CARDPTLTDIVVVPAAPDYYYGMDVW

SEQ ID NO: 51706 - protein, 21 aa, Homo sapiens
CARDLSNYDSSGYYGDAVDIW

SEQ ID NO: 51707 - protein, 19 aa, Homo sapiens
CARGISTYSSSRPYRFDYW

SEQ ID NO: 51708 - protein, 28 aa, Homo sapiens
CAKDQSPRDFHYDILTGYYHYYYGMDVW

SEQ ID NO: 51709 - protein, 16 aa, Homo sapiens
CARELYSGGSWSLDYW

SEQ ID NO: 51710 - protein, 17 aa, Homo sapiens
CARACRYNWNDCWFDPW

SEQ ID NO: 51711 - protein, 26 aa, Homo sapiens
CARESDSITIFGVVKTYYYYYYMDVW

SEQ ID NO: 51712 - protein, 17 aa, Homo sapiens
CARDRGYSYGTTYFDYW

SEQ ID NO: 51713 - protein, 25 aa, Homo sapiens
CARQKGPSTPGGYVGYYYYYGMDVW

SEQ ID NO: 51714 - protein, 22 aa, Homo sapiens
CARDRYRRTALSVAGLLPVDYW

SEQ ID NO: 51715 - protein, 16 aa, Homo sapiens
CASSVRYFDWFLFDYW

SEQ ID NO: 51716 - protein, 18 aa, Homo sapiens
CAKSEMPGYGDVEHFQYW

SEQ ID NO: 51717 - protein, 16 aa, Homo sapiens
CVKDRGDSTSAYFDNW

SEQ ID NO: 51718 - protein, 22 aa, Homo sapiens
CARSNIDHYDSSGYYTEGFDSW

SEQ ID NO: 51719 - protein, 18 aa, Homo sapiens
CAKDRGYSSGWPYYFDYW

SEQ ID NO: 51720 - protein, 15 aa, Homo sapiens
CARGNFDWLSALDVW

SEQ ID NO: 51721 - protein, 26 aa, Homo sapiens
CARDSHYYDVWSGYYPARYYYYKDVW

SEQ ID NO: 51722 - protein, 21 aa, Homo sapiens
CARVSYDILTGYSQGFWFDPW

SEQ ID NO: 51723 - protein, 16 aa, Homo sapiens
CARDRGRNGDFYFDLW

SEQ ID NO: 51724 - protein, 14 aa, Homo sapiens
CARDLVVQGGFDQW

SEQ ID NO: 51725 - protein, 18 aa, Homo sapiens
CAHARFLEWLSPYYFDYW

SEQ ID NO: 51726 - protein, 16 aa, Homo sapiens
CARDLVGQQQLGLDYW

SEQ ID NO: 51727 - protein, 18 aa, Homo sapiens
CARRYYYDSSALDAFDIW

SEQ ID NO: 51728 - protein, 24 aa, Homo sapiens
CARAKLHLVELSPEDYYYYGMDVW

SEQ ID NO: 51729 - protein, 16 aa, Homo sapiens
CARDIPIDHSSSWDYW

SEQ ID NO: 51730 - protein, 21 aa, Homo sapiens
CARRGLGYCSGGSCYEGFDPW

SEQ ID NO: 51731 - protein, 19 aa, Homo sapiens
CARGYYDSSGYYLYYFDYW

SEQ ID NO: 51732 - protein, 23 aa, Homo sapiens
CARGSYYYDSSGYTGGNNWFDPW

SEQ ID NO: 51733 - protein, 15 aa, Homo sapiens
CARINDDILNGADYW

SEQ ID NO: 51734 - protein, 16 aa, Homo sapiens
CATGSGMQQIHWFDPW

SEQ ID NO: 51735 - protein, 19 aa, Homo sapiens
CARDGSRLKLWFHTWFDMW

SEQ ID NO: 51736 - protein, 11 aa, Homo sapiens [sequence omitted]

SEQ ID NO: 51737 - protein, 24 aa, Homo sapiens
CTSPMTTVTTFRGPEKREDAFDIW

SEQ ID NO: 51738 - protein, 20 aa, Homo sapiens
CARDPGLVEWLRRDYYMDVW

SEQ ID NO: 51739 - protein, 21 aa, Homo sapiens
CAKDISYDFWSGYYHYGMDVW

SEQ ID NO: 51740 - protein, 17 aa, Homo sapiens
CAKLPAPTAVAGTLDYW

SEQ ID NO: 51741 - protein, 21 aa, Homo sapiens
CARVRYSNYGIYYYYYYMDVW

SEQ ID NO: 51742 - protein, 19 aa, Homo sapiens
CARGEDPWGDYLRYYFDYW

SEQ ID NO: 51743 - protein, 20 aa, Homo sapiens
CARGAEVYYDSSGYYPYDYW

SEQ ID NO: 51744 - protein, 19 aa, Homo sapiens
CARAGIIENIVATTEFDYW

SEQ ID NO: 51745 - protein, 18 aa, Homo sapiens
CATGDHDFWSGYYPFDYW

SEQ ID NO: 51746 - protein, 18 aa, Homo sapiens
CARPERGSGYYYYYMDVW

SEQ ID NO: 51747 - protein, 21 aa, Homo sapiens
CARHSLDWGYDPQNLYYFDYW

SEQ ID NO: 51748 - protein, 17 aa, Homo sapiens
CARPCDYGGKRGAFDIW

SEQ ID NO: 51749 - protein, 19 aa, Homo sapiens
CARLLTVTTQGGTFYFDYW

SEQ ID NO: 51750 - protein, 22 aa, Homo sapiens
CAREARRITIFGVVITSYFDYW

SEQ ID NO: 51751 - protein, 20 aa, Homo sapiens
CARDSFYDFWSGDGYNFDYW

SEQ ID NO: 51752 - protein, 19 aa, Homo sapiens
CARDFGCPGGVCYVSFDQW

SEQ ID NO: 51753 - protein, 21 aa, Homo sapiens
CARDKDDSSSWYFGRDAFDIW

SEQ ID NO: 51754 - protein, 22 aa, Homo sapiens
CATDRGRYCSSTSCQENWFDPW

SEQ ID NO: 51755 - protein, 20 aa, Homo sapiens
CARGPGYCSGGRCYSWFDSW

SEQ ID NO: 51756 - protein, 20 aa, Homo sapiens
CASINVDTAKDYYYYYMDVW

SEQ ID NO: 51757 - protein, 16 aa, Homo sapiens
CARGAYGDKRGGYDYW

SEQ ID NO: 51758 - protein, 21 aa, Homo sapiens
CARDPIPYYYDTRGPKYFDYW

SEQ ID NO: 51759 - protein, 18 aa, Homo sapiens
CARGSDYGDYVGDYMDVW

SEQ ID NO: 51760 - protein, 27 aa, Homo sapiens
CARDRWSSRYSSSSEDFYYYYYGMDVW

SEQ ID NO: 51761 - protein, 16 aa, Homo sapiens
CARVGGDAPYVYFDLW

SEQ ID NO: 51762 - protein, 22 aa, Homo sapiens
CARDRGHDFWSGYSDLGGFDYW

SEQ ID NO: 51763 - protein, 25 aa, Homo sapiens
CARGGWCSGGSCPEGDYYYYYMDVW

SEQ ID NO: 51764 - protein, 16 aa, Homo sapiens
CAKDHAYGDFFNFDYW

SEQ ID NO: 51765 - protein, 21 aa, Homo sapiens
CARAQPVCSSTSCYGNWFDPW

SEQ ID NO: 51766 - protein, 21 aa, Homo sapiens
CAREYYDILTGSLASKNFDYW

SEQ ID NO: 51767 - protein, 17 aa, Homo sapiens
CVGARWVAPDYYYMDVW

SEQ ID NO: 51768 - protein, 18 aa, Homo sapiens
CAKGGHGSYEGYYYMDVW

SEQ ID NO: 51769 - protein, 17 aa, Homo sapiens
CAREVNIVRATSALDIW

SEQ ID NO: 51770 - protein, 31 aa, Homo sapiens
CARETEPKGYDFWSGYYTGIGGYHYYGMDVW

SEQ ID NO: 51771 - protein, 22 aa, Homo sapiens
CARDEVTLDSSGYYYTNHFDYW

SEQ ID NO: 51772 - protein, 21 aa, Homo sapiens
CATAMVQGVPLFPELVLFDPW

SEQ ID NO: 51773 - protein, 17 aa, Homo sapiens
CARHWRGSSPPNYFDSW

SEQ ID NO: 51774 - protein, 24 aa, Homo sapiens
CASGPINYDYIWGSYRYTSGGDYW

SEQ ID NO: 51775 - protein, 14 aa, Homo sapiens
CARDGGVGSGLDYW

SEQ ID NO: 51776 - protein, 24 aa, Homo sapiens
CARAEWRYFDWLSGTGTFYYFDYW

SEQ ID NO: 51777 - protein, 17 aa, Homo sapiens
CATEFSYYGSGSGLDYW

SEQ ID NO: 51778 - protein, 18 aa, Homo sapiens
CARDGGDLETVNNWFDPW

SEQ ID NO: 51779 - protein, 16 aa, Homo sapiens
CARDTSGSVVIHFDYW

SEQ ID NO: 51780 - protein, 22 aa, Homo sapiens
CAREGTYIVVVPAAPRDWFDPW

SEQ ID NO: 51781 - protein, 19 aa, Homo sapiens
CARDSSHYDFWSEYYMDVW

SEQ ID NO: 51782 - protein, 21 aa, Homo sapiens
CARDRRRFLEWSYYYYGMDVW

SEQ ID NO: 51783 - protein, 14 aa, Homo sapiens
CARGSTVFGVNDYW

SEQ ID NO: 51784 - protein, 19 aa, Homo sapiens
CARTTQHIYDFWNYYFDYW

SEQ ID NO: 51785 - protein, 17 aa, Homo sapiens
CARGESFGGVTAEFNYW

SEQ ID NO: 51786 - protein, 22 aa, Homo sapiens
CARIRAEWLLEGYYYYYGMDVW

SEQ ID NO: 51787 - protein, 23 aa, Homo sapiens
CARRYESYRNYSNYYYYYGMDVW

SEQ ID NO: 51788 - protein, 19 aa, Homo sapiens
CARSGITIFGVIEYYFDYW

SEQ ID NO: 51789 - protein, 25 aa, Homo sapiens
CAREDDIVVVPAAREVYYYYGMDVW

SEQ ID NO: 51790 - protein, 21 aa, Homo sapiens
CAGTWYPVGQLERRLRYFDLW

SEQ ID NO: 51791 - protein, 14 aa, Homo sapiens
CARLGWLRGHFDYW

SEQ ID NO: 51792 - protein, 17 aa, Homo sapiens
CAKGLTHTVTTWAFDYW

SEQ ID NO: 51793 - protein, 17 aa, Homo sapiens
CVSYYDSSDYYFEFDYW

SEQ ID NO: 51794 - protein, 20 aa, Homo sapiens
CARVWGSSSWYKYYYYMDVW

SEQ ID NO: 51795 - protein, 12 aa, Homo sapiens
CASRRFDYDYIW

SEQ ID NO: 51796 - protein, 18 aa, Homo sapiens
CARHADYLVGAELWFDPW

SEQ ID NO: 51797 - protein, 21 aa, Homo sapiens
CARVGYYDSSGYYSNSPFDYW

SEQ ID NO: 51798 - protein, 16 aa, Homo sapiens
CATSAVTARVGWFDPW

SEQ ID NO: 51799 - protein, 15 aa, Homo sapiens
CARGYDILTTTFDYW

SEQ ID NO: 51800 - protein, 16 aa, Homo sapiens
CARGGGDSFFEAFDYW

SEQ ID NO: 51801 - protein, 16 aa, Homo sapiens
CARDWEPAEYDAFDIW

SEQ ID NO: 51802 - protein, 17 aa, Homo sapiens
CTITDYGDYYHTLVDYW

SEQ ID NO: 51803 - protein, 25 aa, Homo sapiens
CARIRNWWSRGFWFRDQTMYYFDYW

SEQ ID NO: 51804 - protein, 18 aa, Homo sapiens
CARDGYSSSWSEYYFDYW

SEQ ID NO: 51805 - protein, 19 aa, Homo sapiens
CARDLFTMIQGVIGRFDPW

SEQ ID NO: 51806 - protein, 20 aa, Homo sapiens
CARGGGTRFLEWFQYYFDYW

SEQ ID NO: 51807 - protein, 16 aa, Homo sapiens
CAKIFDSGYDYAVDYW

SEQ ID NO: 51808 - protein, 17 aa, Homo sapiens
CATDAGGLYPRRWFDPW

SEQ ID NO: 51809 - protein, 15 aa, Homo sapiens
CARVLNAGGYFFEYW

SEQ ID NO: 51810 - protein, 11 aa, Homo sapiens [sequence omitted]

SEQ ID NO: 51811 - protein, 15 aa, Homo sapiens
CATVYGENDYYMDVW

SEQ ID NO: 51812 - protein, 24 aa, Homo sapiens
CARDRGPVYCGGGNCYSRNAFDIW

SEQ ID NO: 51813 - protein, 15 aa, Homo sapiens
CASGYYDFWSGIDYW

SEQ ID NO: 51814 - protein, 17 aa, Homo sapiens
CARAEFVFRRGHWFDPW

SEQ ID NO: 51815 - protein, 19 aa, Homo sapiens
CARQNGEWELLLPYYFDYW

SEQ ID NO: 51816 - protein, 18 aa, Homo sapiens
CAKVDSSGWYGDNYFDYW

SEQ ID NO: 51817 - protein, 14 aa, Homo sapiens
CARHRKVLSAFDIW

SEQ ID NO: 51818 - protein, 18 aa, Homo sapiens
CARHVLLWFRETNYFDYW

SEQ ID NO: 51819 - protein, 26 aa, Homo sapiens
CAKELFYYDSSGYYYLYYYYYGMDVW

SEQ ID NO: 51820 - protein, 15 aa, Homo sapiens
CAHRSPLGGSYFNYW

SEQ ID NO: 51821 - protein, 30 aa, Homo sapiens
CTTEEAPLGAPRRYYDTSGNYYHSQDFDYW

SEQ ID NO: 51822 - protein, 23 aa, Homo sapiens
CARVGMYYDILTGYQVSYYFDYW

SEQ ID NO: 51823 - protein, 21 aa, Homo sapiens
CARSRQYSSSSNYFYYYMDVW

SEQ ID NO: 51824 - protein, 23 aa, Homo sapiens
CARNAPIFGVVTSGYDYYYMDVW

SEQ ID NO: 51825 - protein, 14 aa, Homo sapiens
CARVLGSWYPFDYW

SEQ ID NO: 51826 - protein, 20 aa, Homo sapiens
CARDRPLTTVTRDFDAFDIW

SEQ ID NO: 51827 - protein, 19 aa, Homo sapiens
CATGFSYYDSSGYQTIDYW

SEQ ID NO: 51828 - protein, 19 aa, Homo sapiens
CATDSRGLRYFDWFPFDYW

SEQ ID NO: 51829 - protein, 19 aa, Homo sapiens
CARPYCNSIGCSPNWFDPW

SEQ ID NO: 51830 - protein, 14 aa, Homo sapiens
CARAEMAHERLDYW

SEQ ID NO: 51831 - protein, 17 aa, Homo sapiens
CASGGSYQLIQNWFDPW

SEQ ID NO: 51832 - protein, 23 aa, Homo sapiens
CARGGRHSYGYVYYYYYYGMDVW

SEQ ID NO: 51833 - protein, 22 aa, Homo sapiens
CARDGFGQYSYGQYYYYGMDVW

SEQ ID NO: 51834 - protein, 13 aa, Homo sapiens
CARLLTNLGCDYW

SEQ ID NO: 51835 - protein, 17 aa, Homo sapiens
CARATWAYGDPPYFDYW

SEQ ID NO: 51836 - protein, 24 aa, Homo sapiens
CARNSITIFGVVIMPYYYYYMDVW

SEQ ID NO: 51837 - protein, 19 aa, Homo sapiens
CARVPFCSGGSCKFWFDPW

SEQ ID NO: 51838 - protein, 20 aa, Homo sapiens
CARDSPSRLRYFDGDAFDIW

SEQ ID NO: 51839 - protein, 19 aa, Homo sapiens
CARDIMITFGGVIVSPDYW

SEQ ID NO: 51840 - protein, 12 aa, Homo sapiens
CNSYAGSNNLAF

SEQ ID NO: 51841 - protein, 22 aa, Homo sapiens
CARSISLRYFDYLYYYYGMDVW

SEQ ID NO: 51842 - protein, 16 aa, Homo sapiens
CARAFTVTTSFPSDYW

SEQ ID NO: 51843 - protein, 21 aa, Homo sapiens
CARDYSSSSYPFFDYYYMDVW

SEQ ID NO: 51844 - protein, 21 aa, Homo sapiens
CAREFGYGDPSDYYYYGMDVW

SEQ ID NO: 51845 - protein, 24 aa, Homo sapiens
CARFEDIVVVPAAMDWYYYGMDVW

SEQ ID NO: 51846 - protein, 22 aa, Homo sapiens
CARVAHGPRVTSIVYPGSFDYW

SEQ ID NO: 51847 - protein, 17 aa, Homo sapiens
CATTFAMIVGLDTFDYW

SEQ ID NO: 51848 - protein, 17 aa, Homo sapiens
CATFYSNDYGDLHFDYW

SEQ ID NO: 51849 - protein, 15 aa, Homo sapiens
CATGPVSSSFWFDPW

SEQ ID NO: 51850 - protein, 21 aa, Homo sapiens
CANQDYDFWSGDYYYYYMDVW

SEQ ID NO: 51851 - protein, 22 aa, Homo sapiens
CARDRGVPAAIGGYYYYYMDVW

SEQ ID NO: 51852 - protein, 24 aa, Homo sapiens
CARLPPGVHDSSPDYYYYYGMDVW

SEQ ID NO: 51853 - protein, 17 aa, Homo sapiens
CARWVYDSSGYHRFDPW

SEQ ID NO: 51854 - protein, 15 aa, Homo sapiens
CSSYTGSTTLTLVVF

SEQ ID NO: 51855 - protein, 16 aa, Homo sapiens
CARAPQWLVLGDFDYW

SEQ ID NO: 51856 - protein, 22 aa, Homo sapiens
CASQTITIFGVEVQGADAFDIW

SEQ ID NO: 51857 - protein, 21 aa, Homo sapiens
CAREDSSSWYGYDYYYYMDVW

SEQ ID NO: 51858 - protein, 18 aa, Homo sapiens
CARLETYYDSSHDWFDPW

SEQ ID NO: 51859 - protein, 22 aa, Homo sapiens
CARVGWDYGSGSYRRHNWFDPW

SEQ ID NO: 51860 - protein, 21 aa, Homo sapiens
CARDPYTTIWSGYRLGWFDPW

SEQ ID NO: 51861 - protein, 17 aa, Homo sapiens
CAREDVVGSRCCYFDYW

SEQ ID NO: 51862 - protein, 25 aa, Homo sapiens
CARVACAVPTKPALFCYYYYYMDVW

SEQ ID NO: 51863 - protein, 16 aa, Homo sapiens
CARDRWDSSSPYFDYW

SEQ ID NO: 51864 - protein, 15 aa, Homo sapiens
CARGPRAATVTLDYW

SEQ ID NO: 51865 - protein, 18 aa, Homo sapiens
CASAGSGFLGAHERFDFW

SEQ ID NO: 51866 - protein, 15 aa, Homo sapiens
CARDGLLAVTRLDYW

SEQ ID NO: 51867 - protein, 22 aa, Homo sapiens
CARDQSPSCSSVSCYTYYFDHW

SEQ ID NO: 51868 - protein, 23 aa, Homo sapiens
CARYPTHHYCSGGGCYSDAFDVW

SEQ ID NO: 51869 - protein, 17 aa, Homo sapiens
CAKGISGTVGADGFDVW

SEQ ID NO: 51870 - protein, 21 aa, Homo sapiens
CARGNILRYFDWLSYYYMDVW

SEQ ID NO: 51871 - protein, 17 aa, Homo sapiens
CAKIYDFWSGASGGDYW

SEQ ID NO: 51872 - protein, 17 aa, Homo sapiens
CAHRPSRSIVATDFDYW

SEQ ID NO: 51873 - protein, 16 aa, Homo sapiens
CVKTLSSGWYVPFDYW

SEQ ID NO: 51874 - protein, 22 aa, Homo sapiens
CARVPWGVTMIVVVTPGAFDIW

SEQ ID NO: 51875 - protein, 21 aa, Homo sapiens
CARCPILEWLSGYYYYGMDVW

SEQ ID NO: 51876 - protein, 17 aa, Homo sapiens
CARDLDGSGSYDWFDPW

SEQ ID NO: 51877 - protein, 17 aa, Homo sapiens
CAPGYYDFWSGSTFDPW

SEQ ID NO: 51878 - protein, 19 aa, Homo sapiens
CARAANGVTIFGTNWFDPW

SEQ ID NO: 51879 - protein, 14 aa, Homo sapiens
CASLITMIAHFDYW

SEQ ID NO: 51880 - protein, 11 aa, Homo sapiens
CHQYYSTRASF

SEQ ID NO: 51881 - protein, 22 aa, Homo sapiens
CARDFGVFFGNLGGYDRDDDYW

SEQ ID NO: 51882 - protein, 18 aa, Homo sapiens
CTTDYGDYVGYYYYMDVW

SEQ ID NO: 51883 - protein, 21 aa, Homo sapiens
CARHIVHCSGGSCSNWYFDLW

SEQ ID NO: 51884 - protein, 16 aa, Homo sapiens
CATVPAVLLHRGFDYW

SEQ ID NO: 51885 - protein, 17 aa, Homo sapiens
CARVGVTMVQGLGFDPW

SEQ ID NO: 51886 - protein, 18 aa, Homo sapiens
CARTENSGSWSRVYFDYW

SEQ ID NO: 51887 - protein, 20 aa, Homo sapiens
CARGQVGYCSGGSCYWFDPW

SEQ ID NO: 51888 - protein, 28 aa, Homo sapiens
CARAPGPYGSGSYRPTGGLYYYYGMDVW

SEQ ID NO: 51889 - protein, 23 aa, Homo sapiens
CARRGIVHDYIWGSYRHDAFDIW

SEQ ID NO: 51890 - protein, 24 aa, Homo sapiens
CARILKERRRFRELLSYYYGMDVW

SEQ ID NO: 51891 - protein, 23 aa, Homo sapiens
CARDLHYYDSSGTLRVEYYFDYW

SEQ ID NO: 51892 - protein, 19 aa, Homo sapiens
CAREGDYYDSSGYSHFGYW

SEQ ID NO: 51893 - protein, 18 aa, Homo sapiens
CATSIAVAGRRPPWFDPW

SEQ ID NO: 51894 - protein, 15 aa, Homo sapiens
CARSVRGPHDDFDIW

SEQ ID NO: 51895 - protein, 22 aa, Homo sapiens
CTTDRITVLRFLEWLLLPFDYW

SEQ ID NO: 51896 - protein, 22 aa, Homo sapiens
CARHPYHYDTSGYYLSVWFDYW

SEQ ID NO: 51897 - protein, 15 aa, Homo sapiens
CARVGWLAQVPFDIW

SEQ ID NO: 51898 - protein, 14 aa, Homo sapiens
CAKALVPLSPFDPW

SEQ ID NO: 51899 - protein, 17 aa, Homo sapiens
CARLAGAMEPLGWFDPW

SEQ ID NO: 51900 - protein, 20 aa, Homo sapiens
CAKLRDFLTDEYSSSSVDYW

SEQ ID NO: 51901 - protein, 25 aa, Homo sapiens
CAKGQDSCSSTSCYWYYYYYYMDVW

SEQ ID NO: 51902 - protein, 21 aa, Homo sapiens
CTTSVSITIFGVVRGDAFDIW

SEQ ID NO: 51903 - protein, 13 aa, Homo sapiens
CTMGTSRDPFGYW

SEQ ID NO: 51904 - protein, 21 aa, Homo sapiens
CARHEGGITMVQGVTELFDYW

SEQ ID NO: 51905 - protein, 14 aa, Homo sapiens
CNSGYYDSSPKDYW

SEQ ID NO: 51906 - protein, 20 aa, Homo sapiens
CARALGVVVGFYYYYGMDVW

SEQ ID NO: 51907 - protein, 20 aa, Homo sapiens
CARDRFRGDYGWTDDAFDIW

SEQ ID NO: 51908 - protein, 14 aa, Homo sapiens
CAHRGGWFAYFDYW

SEQ ID NO: 51909 - protein, 12 aa, Homo sapiens
CLQHDNFPLGSF

SEQ ID NO: 51910 - protein, 16 aa, Homo sapiens
CQPIPVRLGVDAFDIW

SEQ ID NO: 51911 - protein, 24 aa, Homo sapiens
CARDLPGYSSGWYEIYYYYGMDVW

SEQ ID NO: 51912 - protein, 22 aa, Homo sapiens
CAHRPSGITIFGVGTKNWFDPW

SEQ ID NO: 51913 - protein, 25 aa, Homo sapiens
CARVQFPTNPIWFRELTYYYYMDVW

SEQ ID NO: 51914 - protein, 18 aa, Homo sapiens
CARDPFIWGSYRYYFDYW

SEQ ID NO: 51915 - protein, 17 aa, Homo sapiens
CAKAVRTAVAGWPFDYW

SEQ ID NO: 51916 - protein, 23 aa, Homo sapiens
CARDRLTYYDFWSAEDGYYFDYW

SEQ ID NO: 51917 - protein, 23 aa, Homo sapiens
CARTHTSSSWYLGDYYYYYMDVW

SEQ ID NO: 51918 - protein, 20 aa, Homo sapiens
CARQYYYDSSGYYYNWFDPW

SEQ ID NO: 51919 - protein, 13 aa, Homo sapiens
CSPWDDSLNGPIF

SEQ ID NO: 51920 - protein, 19 aa, Homo sapiens
CALPISGTKSYYYYGMDVW

SEQ ID NO: 51921 - protein, 16 aa, Homo sapiens
CARGGYNWNSNWFDPW

SEQ ID NO: 51922 - protein, 16 aa, Homo sapiens
CVRDRYNYADVRLDYW

SEQ ID NO: 51923 - protein, 15 aa, Homo sapiens
CAREGVGSGYWFDPW

SEQ ID NO: 51924 - protein, 20 aa, Homo sapiens
CARVNGPLAAGTRLGWFDPW

SEQ ID NO: 51925 - protein, 19 aa, Homo sapiens
CARVGPGYYDYYYYGMDVW

SEQ ID NO: 51926 - protein, 15 aa, Homo sapiens
CQQYNSYSPSFMYTF

SEQ ID NO: 51927 - protein, 16 aa, Homo sapiens
CAHRRAAAASSYFQHW

SEQ ID NO: 51928 - protein, 29 aa, Homo sapiens
CAREGGAPTHRRIMITFGGVIVSYYFDYW

SEQ ID NO: 51929 - protein, 18 aa, Homo sapiens
CARSSPPWLQLDDAFDIW

SEQ ID NO: 51930 - protein, 20 aa, Homo sapiens
CARDLQWLPPYYYYYYMDVW

SEQ ID NO: 51931 - protein, 11 aa, Homo sapiens [sequence omitted]

SEQ ID NO: 51932 - protein, 15 aa, Homo sapiens
CAKELVVRGRYFDYW

SEQ ID NO: 51933 - protein, 22 aa, Homo sapiens
CAREPVLRYFDWTASQYYFDYW

SEQ ID NO: 51934 - protein, 20 aa, Homo sapiens
CARDERFYYDSSEGDAFDIW

SEQ ID NO: 51935 - protein, 19 aa, Homo sapiens
CARDLVAIDDYMRGYMDVW

SEQ ID NO: 51936 - protein, 16 aa, Homo sapiens
CARDGSTTGWYAGDYW

SEQ ID NO: 51937 - protein, 24 aa, Homo sapiens
CARWKVSEYSGYDPRYYYYGMDVW

SEQ ID NO: 51938 - protein, 19 aa, Homo sapiens
CARSHYDILTGHEVTFDYW

SEQ ID NO: 51939 - protein, 20 aa, Homo sapiens
CATAIWDSAFWSGYYSFDYW

SEQ ID NO: 51940 - protein, 14 aa, Homo sapiens
CGTWDGSLSVDWVF

SEQ ID NO: 51941 - protein, 21 aa, Homo sapiens
CAKEQYYDFWSGYSYYGMDVW

SEQ ID NO: 51942 - protein, 19 aa, Homo sapiens
CARDKVEMATIGDWYFDYW

SEQ ID NO: 51943 - protein, 16 aa, Homo sapiens
CASLPSHTYPQLIDYW

SEQ ID NO: 51944 - protein, 22 aa, Homo sapiens
CARDVRYYGSGSYYEWGYFDYW

SEQ ID NO: 51945 - protein, 30 aa, Homo sapiens
CARAPLLSDLGGYFDWLSQTPYYYYGMDVW

SEQ ID NO: 51946 - protein, 16 aa, Homo sapiens
CARAHSGSYYTPFDYW

SEQ ID NO: 51947 - protein, 22 aa, Homo sapiens
CARGPVVAAAAFYYFYYYMDVW

SEQ ID NO: 51948 - protein, 21 aa, Homo sapiens
CARGIEYYDFWSGYTPFGDYW

SEQ ID NO: 51949 - protein, 22 aa, Homo sapiens
CARSRLMVQGFLIETLDHFDYW

SEQ ID NO: 51950 - protein, 19 aa, Homo sapiens
CAKLNYDFWSGYYSQIDYW

SEQ ID NO: 51951 - protein, 16 aa, Homo sapiens
CAKVLYCSSTSCDDYW

SEQ ID NO: 51952 - protein, 13 aa, Homo sapiens
CANADLRVLHDYW

SEQ ID NO: 51953 - protein, 22 aa, Homo sapiens
CARDELVGDFWSRYYYYGMDVW

SEQ ID NO: 51954 - protein, 12 aa, Homo sapiens
CASASWAPPDYW

SEQ ID NO: 51955 - protein, 22 aa, Homo sapiens
CAKVGFYYDILTGYPDDAFDIW

SEQ ID NO: 51956 - protein, 21 aa, Homo sapiens
CARVWAYCSSTSCPANWFDPW

SEQ ID NO: 51957 - protein, 24 aa, Homo sapiens
CAREPRGYYDSSGYYYRTGYFDYW

SEQ ID NO: 51958 - protein, 20 aa, Homo sapiens
CATMAVFCSSTSCYFYMDVW

SEQ ID NO: 51959 - protein, 19 aa, Homo sapiens
CAKIAGSSGYYTPAAFDIW

SEQ ID NO: 51960 - protein, 18 aa, Homo sapiens
CAKDAYSSSSVWWYFDLW

SEQ ID NO: 51961 - protein, 15 aa, Homo sapiens
CAHRHMVQENLFDYW

SEQ ID NO: 51962 - protein, 21 aa, Homo sapiens
CARGTPILRFLEWLPYYFDYW

SEQ ID NO: 51963 - protein, 22 aa, Homo sapiens
CARDRSPWTGATDYYYYGMDVW

SEQ ID NO: 51964 - protein, 15 aa, Homo sapiens
CARGGSSVGQSPDYW

SEQ ID NO: 51965 - protein, 19 aa, Homo sapiens
CARGYEVLEWFPPQYFDYW

SEQ ID NO: 51966 - protein, 22 aa, Homo sapiens
CATAPPMVQGVISPSGRWFDPW

SEQ ID NO: 51967 - protein, 15 aa, Homo sapiens
CQSGDSSRSYFYWVF

SEQ ID NO: 51968 - protein, 21 aa, Homo sapiens
CARVYYYGSGSYPRGFYMDVW

SEQ ID NO: 51969 - protein, 27 aa, Homo sapiens
CARIVADYGDYDTPPDADYYYYGMDVW

SEQ ID NO: 51970 - protein, 17 aa, Homo sapiens
CARDRDDGDYDHAFDIW

SEQ ID NO: 51971 - protein, 23 aa, Homo sapiens
CARESGTSGRDYTYKYDYAMDVW

SEQ ID NO: 51972 - protein, 24 aa, Homo sapiens
CARELYDFWSGYSYSYYYYYMDVW

SEQ ID NO: 51973 - protein, 18 aa, Homo sapiens
CARDGMHYYDSSGYYGYW

SEQ ID NO: 51974 - protein, 20 aa, Homo sapiens
CVKGTSGHCNGANCYPFDYW

SEQ ID NO: 51975 - protein, 23 aa, Homo sapiens
CARDGGLKRYSSGWYETYYFDYW

SEQ ID NO: 51976 - protein, 21 aa, Homo sapiens
CARGGGQWGATKYYYYGMDVW

SEQ ID NO: 51977 - protein, 21 aa, Homo sapiens
CARDMGYDPEFGGVIGPHDYW

SEQ ID NO: 51978 - protein, 27 aa, Homo sapiens
CARAKGVGTPDLVTIFGVVTANWFDPW

SEQ ID NO: 51979 - protein, 21 aa, Homo sapiens
CARGGWRVEAADYYYYYMDVW

SEQ ID NO: 51980 - protein, 24 aa, Homo sapiens
CARDSGDGYNFVFGAVFVGPNDYW

SEQ ID NO: 51981 - protein, 21 aa, Homo sapiens
CARAYYYDSSGYWSQGWFDPW

SEQ ID NO: 51982 - protein, 18 aa, Homo sapiens
CARDHGSGNYYIDYFDYW

SEQ ID NO: 51983 - protein, 16 aa, Homo sapiens
CAKLRGYGDYGYADYW

SEQ ID NO: 51984 - protein, 14 aa, Homo sapiens
CSRDPLGANYASYW

SEQ ID NO: 51985 - protein, 24 aa, Homo sapiens
CARHAPPPYDYIWGSYRDDAFDIW

SEQ ID NO: 51986 - protein, 22 aa, Homo sapiens
CAREAYGQAGSSGYYGDAFDIW

SEQ ID NO: 51987 - protein, 20 aa, Homo sapiens
CARDRDWQDYGDGAWYFDLW

SEQ ID NO: 51988 - protein, 18 aa, Homo sapiens
CARWIDDYGENHDAFDIW

SEQ ID NO: 51989 - protein, 25 aa, Homo sapiens
CTTLLTRRPLMITFGGVITIKDDYW

SEQ ID NO: 51990 - protein, 12 aa, Homo sapiens
CASSPQLALDYW

SEQ ID NO: 51991 - protein, 23 aa, Homo sapiens
CARTSPEYSGYDLGYYYYYMDVW

SEQ ID NO: 51992 - protein, 15 aa, Homo sapiens
CARHQTGVMGDFDYW

SEQ ID NO: 51993 - protein, 21 aa, Homo sapiens
CAGAPFRMGQGVPTYFHFDRW

SEQ ID NO: 51994 - protein, 17 aa, Homo sapiens
CAPTGTGITRSDTFDVW

SEQ ID NO: 51995 - protein, 18 aa, Homo sapiens
CARSAAAPPLAPYYFDYW

SEQ ID NO: 51996 - protein, 12 aa, Homo sapiens
CASSGWYYPEYW

SEQ ID NO: 51997 - protein, 14 aa, Homo sapiens
CARDRNAGWNTDYW

SEQ ID NO: 51998 - protein, 18 aa, Homo sapiens
CASGGIVGATKQWAFDYW

SEQ ID NO: 51999 - protein, 15 aa, Homo sapiens
CAREFLRSEWGFDYW

SEQ ID NO: 52000 - protein, 19 aa, Homo sapiens
CAREEKSDYGDYYYGMDVW

SEQ ID NO: 52001 - protein, 19 aa, Homo sapiens
CARHHYDFWSGYSNWFDPW

SEQ ID NO: 52002 - protein, 27 aa, Homo sapiens
CARDQIIGYCSGGSCYSAFYYYGMDVW

SEQ ID NO: 52003 - protein, 22 aa, Homo sapiens
CARGSWITGTTLRYYYYGMDVW

SEQ ID NO: 52004 - protein, 15 aa, Homo sapiens
CAKDIGPGFDYFDYW

SEQ ID NO: 52005 - protein, 22 aa, Homo sapiens
CARHGVTMIVVVPIGGGAFDIW

SEQ ID NO: 52006 - protein, 16 aa, Homo sapiens
CALIAVTGSGGWFDSW

SEQ ID NO: 52007 - protein, 27 aa, Homo sapiens
CARESLDAEPLITIFGVPYIPGWFDPW

SEQ ID NO: 52008 - protein, 17 aa, Homo sapiens
CARYQDGAAADLYFDYW

SEQ ID NO: 52009 - protein, 18 aa, Homo sapiens
CARAVAGTFHWSDWFDPW

SEQ ID NO: 52010 - protein, 22 aa, Homo sapiens
CARGIPLDDYIWGSYRDPFDYW

SEQ ID NO: 52011 - protein, 23 aa, Homo sapiens
CAREFHYYGSGSPNYYYYYMDVW

SEQ ID NO: 52012 - protein, 18 aa, Homo sapiens
CAREEEDYGDYVRWFDPW

SEQ ID NO: 52013 - protein, 22 aa, Homo sapiens
CARTEGLHLGQLSLVGDAFDIW

SEQ ID NO: 52014 - protein, 26 aa, Homo sapiens
CARGVCSSTSCYDYDYIWGSYRFDYW

SEQ ID NO: 52015 - protein, 19 aa, Homo sapiens
CAHNPNLLNWNYVCYFDYW

SEQ ID NO: 52016 - protein, 20 aa, Homo sapiens
CARGDYYDSSGYPLSYMDVW

SEQ ID NO: 52017 - protein, 14 aa, Homo sapiens
CARGDLGAARGDYW

SEQ ID NO: 52018 - protein, 20 aa, Homo sapiens
CARGWLDCSGGSCYQLFDYW

SEQ ID NO: 52019 - protein, 20 aa, Homo sapiens
CARGDYGDDAQYYYYYMDVW

SEQ ID NO: 52020 - protein, 14 aa, Homo sapiens
CSSFTSSSTPGVVF

SEQ ID NO: 52021 - protein, 16 aa, Homo sapiens
CVRDLRSGWVNWFDTW

SEQ ID NO: 52022 - protein, 16 aa, Homo sapiens
CARLYSRGPNWYFDLW

SEQ ID NO: 52023 - protein, 19 aa, Homo sapiens
CARESPTVTTKGDGAFDIW

SEQ ID NO: 52024 - protein, 23 aa, Homo sapiens
CARIYGQDDYIWGSYRLYYFDYW

SEQ ID NO: 52025 - protein, 16 aa, Homo sapiens
CARVWAVTTLGWFDPW

SEQ ID NO: 52026 - protein, 12 aa, Homo sapiens
CVVSVIDAFDIW

SEQ ID NO: 52027 - protein, 17 aa, Homo sapiens
CAHSEHFDWLFDAFDIW

SEQ ID NO: 52028 - protein, 23 aa, Homo sapiens
CARGRIWPDILTGYSHYYGMDVW

SEQ ID NO: 52029 - protein, 18 aa, Homo sapiens
CATWATVTNLGGDAFDIW

SEQ ID NO: 52030 - protein, 19 aa, Homo sapiens
CARVPDYGDYDYVGPFDYW

SEQ ID NO: 52031 - protein, 18 aa, Homo sapiens
CAKDEGQWLVLDSYFDYW

SEQ ID NO: 52032 - protein, 26 aa, Homo sapiens
CARGVQSNGAYDYIWGSYRSRWFDPW

SEQ ID NO: 52033 - protein, 18 aa, Homo sapiens
CARGGNSNPLYYYYMDVW

SEQ ID NO: 52034 - protein, 20 aa, Homo sapiens
CARLEYYDILTGYYKHFDYW

SEQ ID NO: 52035 - protein, 28 aa, Homo sapiens
CTTPPTYYDFWSGYYMGYADYYYYMDVW

SEQ ID NO: 52036 - protein, 18 aa, Homo sapiens
CARDRINYGGPSAVFDYW

SEQ ID NO: 52037 - protein, 21 aa, Homo sapiens
CAREYYDFWSGYSMGYYFDYW

SEQ ID NO: 52038 - protein, 17 aa, Homo sapiens
CAREQPINWDGGYFDYW

SEQ ID NO: 52039 - protein, 14 aa, Homo sapiens
CARGPRNYDFLDVW

SEQ ID NO: 52040 - protein, 20 aa, Homo sapiens
CAKSRYSGYDSDPNNWFDPW

SEQ ID NO: 52041 - protein, 20 aa, Homo sapiens
CARGSYSSSWYGPHWYFDLW

SEQ ID NO: 52042 - protein, 18 aa, Homo sapiens
CATASGLRWFREQWFDPW

SEQ ID NO: 52043 - protein, 17 aa, Homo sapiens
CASSTPGYGDYLRFDIW

SEQ ID NO: 52044 - protein, 16 aa, Homo sapiens
CARDSHGGSGSYFDYW

SEQ ID NO: 52045 - protein, 19 aa, Homo sapiens
CAKDGYCSGGSCYSIFDYW

SEQ ID NO: 52046 - protein, 21 aa, Homo sapiens
CARESGFRELSWGATAAFDIW

SEQ ID NO: 52047 - protein, 21 aa, Homo sapiens
CARTRNTIVQGVPVSWYFDLW

SEQ ID NO: 52048 - protein, 22 aa, Homo sapiens
CARSLAAAADQLHYYYYGMDVW

SEQ ID NO: 52049 - protein, 19 aa, Homo sapiens
CVRHLFRGDGSGHYFFDYW

SEQ ID NO: 52050 - protein, 23 aa, Homo sapiens
CARVTTDYDYIWGSYRLSAFDIW

SEQ ID NO: 52051 - protein, 19 aa, Homo sapiens
CARIRYSSGWLGEQIIDYW

SEQ ID NO: 52052 - protein, 21 aa, Homo sapiens
CARENPPRLYGLYYYYYMDVW

SEQ ID NO: 52053 - protein, 17 aa, Homo sapiens
CARFDFEAAAKGAFDIW

SEQ ID NO: 52054 - protein, 13 aa, Homo sapiens
CASDWGVGAPDYW

SEQ ID NO: 52055 - protein, 17 aa, Homo sapiens
CAALGGWYGLGSYFDLW

SEQ ID NO: 52056 - protein, 21 aa, Homo sapiens
CAIAGDIVVVPAAMVRTFDYW

SEQ ID NO: 52057 - protein, 20 aa, Homo sapiens
CVKGVYIVATTNPDYYFDYW

SEQ ID NO: 52058 - protein, 18 aa, Homo sapiens
CATRVVVIAISGDTFDYW

SEQ ID NO: 52059 - protein, 21 aa, Homo sapiens
CARERVLYGGPYGVHDAFDIW

SEQ ID NO: 52060 - protein, 21 aa, Homo sapiens
CARGGGTMVQGVMEVNWFDPW

SEQ ID NO: 52061 - protein, 21 aa, Homo sapiens
CARGAVSSGIVGAMWGWFDPW

SEQ ID NO: 52062 - protein, 14 aa, Homo sapiens
CAREVAIVFYFDSW

SEQ ID NO: 52063 - protein, 15 aa, Homo sapiens
CARDMDHGNNWFDPW

SEQ ID NO: 52064 - protein, 19 aa, Homo sapiens
CARAVWEAGSYTGYYFDYW

SEQ ID NO: 52065 - protein, 19 aa, Homo sapiens
CATGQYCSGGSCYSELDYW

SEQ ID NO: 52066 - protein, 17 aa, Homo sapiens
CARDPHDLDYGDYLSYW

SEQ ID NO: 52067 - protein, 15 aa, Homo sapiens
CARDPFGDSGGFDYW

SEQ ID NO: 52068 - protein, 13 aa, Homo sapiens
CQSADSSGINCEF

SEQ ID NO: 52069 - protein, 25 aa, Homo sapiens
CARSPPFMITFGGVIDLYYYYMDVW

SEQ ID NO: 52070 - protein, 13 aa, Homo sapiens
CASNYVEGYMDVW

SEQ ID NO: 52071 - protein, 17 aa, Homo sapiens
CARGIYRFPPTGWFDPW

SEQ ID NO: 52072 - protein, 18 aa, Homo sapiens
CAKAPFSSTWNGPHFDSW

SEQ ID NO: 52073 - protein, 15 aa, Homo sapiens
CASLPTYNWDYFYSW

SEQ ID NO: 52074 - protein, 19 aa, Homo sapiens
CARLSNCGGDCYSFDFDYW

SEQ ID NO: 52075 - protein, 21 aa, Homo sapiens
CARDGPEGLEEYYGPYGMDVW

SEQ ID NO: 52076 - protein, 16 aa, Homo sapiens
CAKLAGIAAAGAQDYW

SEQ ID NO: 52077 - protein, 19 aa, Homo sapiens
CARVMEWEQTLGGKYFDYW

SEQ ID NO: 52078 - protein, 24 aa, Homo sapiens
CARVPRNYYDSSGRWSDHYYMDVW

SEQ ID NO: 52079 - protein, 19 aa, Homo sapiens
CAKIGGYDYGDYGGLADYW

SEQ ID NO: 52080 - protein, 22 aa, Homo sapiens
CARLAVGATIPYYYYYYGMDVW

SEQ ID NO: 52081 - protein, 18 aa, Homo sapiens
CARETTYYYDSSGYYSYW

SEQ ID NO: 52082 - protein, 21 aa, Homo sapiens
CAKDFVQYQLLWGQQDGMDVW

SEQ ID NO: 52083 - protein, 34 aa, Homo sapiens
CARDNRPNDYDFWSGYYFRDLAYEAYYYYGMDVW

SEQ ID NO: 52084 - protein, 26 aa, Homo sapiens
CARGTDSTYYDFWSGYYSDYYGMDVW

SEQ ID NO: 52085 - protein, 20 aa, Homo sapiens
CARHYYDSSGYWDYYYMDVW

SEQ ID NO: 52086 - protein, 19 aa, Homo sapiens
CARVYYGSGTPGGNWFDPW

SEQ ID NO: 52087 - protein, 22 aa, Homo sapiens
CAKEGPGIAVAWWVEATQFDYW

SEQ ID NO: 52088 - protein, 23 aa, Homo sapiens
CARLWCYYDSSGYYFGRCYFDYW

SEQ ID NO: 52089 - protein, 17 aa, Homo sapiens
CARMFGGYYSEYYFDYW

SEQ ID NO: 52090 - protein, 23 aa, Homo sapiens
CAKARYYYDSSGIPHPSYYFDYW

SEQ ID NO: 52091 - protein, 19 aa, Homo sapiens
CAREYYDSSGYYRPGVDYW

SEQ ID NO: 52092 - protein, 13 aa, Homo sapiens
CARDWGNQSFDLW

SEQ ID NO: 52093 - protein, 20 aa, Homo sapiens
CARHHIVRSWPYIYNWFDPW

SEQ ID NO: 52094 - protein, 17 aa, Homo sapiens
CARTRDITGTTIWFDPW

SEQ ID NO: 52095 - protein, 22 aa, Homo sapiens
CARHRPATIFGVVIFGGWFDPW

SEQ ID NO: 52096 - protein, 19 aa, Homo sapiens
CAKMTSYDFWSASYEFDYW

SEQ ID NO: 52097 - protein, 25 aa, Homo sapiens
CATLPPHLKTSLQSSQYDRPHFGYW

SEQ ID NO: 52098 - protein, 21 aa, Homo sapiens
CAREYYDILTGYKNYDAFDIW

SEQ ID NO: 52099 - protein, 30 aa, Homo sapiens
CARGSMVDYDFWSGYYHSGVEYYYYGMDVW

SEQ ID NO: 52100 - protein, 16 aa, Homo sapiens
CARTAIPTPRGYFDYW

SEQ ID NO: 52101 - protein, 20 aa, Homo sapiens
CTRGREWLSRYYYYYGMDVW

SEQ ID NO: 52102 - protein, 12 aa, Homo sapiens
CARTVLLWFDYW

SEQ ID NO: 52103 - protein, 20 aa, Homo sapiens
CATEPYYDILTNYYYGMDVW

SEQ ID NO: 52104 - protein, 19 aa, Homo sapiens
CARDLTPVTPMEGNWFDPW

SEQ ID NO: 52105 - protein, 19 aa, Homo sapiens
CARQHGAVTSYYYYGMDVW

SEQ ID NO: 52106 - protein, 23 aa, Homo sapiens
CATAIVVVPAAIGAYPYNWFDPW

SEQ ID NO: 52107 - protein, 19 aa, Homo sapiens
CARDRDLYVVLALDAFDIW

SEQ ID NO: 52108 - protein, 10 aa, Homo sapiens
CVKDWYGDYW

SEQ ID NO: 52109 - protein, 20 aa, Homo sapiens
CARQYYDFWSGYSTLLFDYW

SEQ ID NO: 52110 - protein, 23 aa, Homo sapiens
CARVRRIDYLEGWAYYYYGMDVW

SEQ ID NO: 52111 - protein, 19 aa, Homo sapiens
CARDFNLQPDYDLWWFDPW

SEQ ID NO: 52112 - protein, 18 aa, Homo sapiens
CAKNSGWYSEPRYYFDYW

SEQ ID NO: 52113 - protein, 23 aa, Homo sapiens
CARTTDIVVVPAAPLYYYYMDVW

SEQ ID NO: 52114 - protein, 24 aa, Homo sapiens
CASSYCSSTSCYSSPYYYYGMDVW

SEQ ID NO: 52115 - protein, 16 aa, Homo sapiens
CARARSGYLGVSVDYW

SEQ ID NO: 52116 - protein, 14 aa, Homo sapiens
CGTGDSSLSAGGVF

SEQ ID NO: 52117 - protein, 21 aa, Homo sapiens
CARDLWRTGGEPYYYYGMDVW

SEQ ID NO: 52118 - protein, 17 aa, Homo sapiens
CATNFAAAGTADWFDPW

SEQ ID NO: 52119 - protein, 19 aa, Homo sapiens
CAKVHDGYGDVGALYFDYW

SEQ ID NO: 52120 - protein, 17 aa, Homo sapiens
CAHEYSSSFYPYYFDYW

SEQ ID NO: 52121 - protein, 15 aa, Homo sapiens
CARRMGATTFDFDYW

SEQ ID NO: 52122 - protein, 20 aa, Homo sapiens
CAKFTHDYGDASYYYGMDVW

SEQ ID NO: 52123 - protein, 16 aa, Homo sapiens
CARDILVGATPYFDYW

SEQ ID NO: 52124 - protein, 19 aa, Homo sapiens
CARDLALLWELVSGAFDIW

SEQ ID NO: 52125 - protein, 19 aa, Homo sapiens
CARVRADSSSWYGVGVDYW

SEQ ID NO: 52126 - protein, 19 aa, Homo sapiens
CARGDPITNGGDGVEFDYW

SEQ ID NO: 52127 - protein, 16 aa, Homo sapiens
CARDTGTGTGSWFDPW

SEQ ID NO: 52128 - protein, 19 aa, Homo sapiens
CARENYDYIWGSSHYFDYW

SEQ ID NO: 52129 - protein, 17 aa, Homo sapiens
CARADTPYDSSDAFDIW

SEQ ID NO: 52130 - protein, 19 aa, Homo sapiens
CAHRRTYSGAWNSGYFDYW

SEQ ID NO: 52131 - protein, 15 aa, Homo sapiens
CARDRSDEGLYFDYW

SEQ ID NO: 52132 - protein, 17 aa, Homo sapiens
CATSPPYDYSKGWFDPW

SEQ ID NO: 52133 - protein, 17 aa, Homo sapiens
CTRKLRYFDWLLFFDYW

SEQ ID NO: 52134 - protein, 20 aa, Homo sapiens
CARLSRDCSGGSCYDYMDVW

SEQ ID NO: 52135 - protein, 20 aa, Homo sapiens
CVRQKDGGIGGFYYYGMDVW

SEQ ID NO: 52136 - protein, 17 aa, Homo sapiens
CARGSIAAAGTGNFDLW

SEQ ID NO: 52137 - protein, 24 aa, Homo sapiens
CARDSRATYYYDSSGYYYSPQDYW

SEQ ID NO: 52138 - protein, 14 aa, Homo sapiens
CAHRSITIFGFDPW

SEQ ID NO: 52139 - protein, 17 aa, Homo sapiens
CARTYYGDYGTIYFDYW

SEQ ID NO: 52140 - protein, 20 aa, Homo sapiens
CARHSYDFWSGTMIGWFDPW

SEQ ID NO: 52141 - protein, 20 aa, Homo sapiens
CARDVPPTHSGYDSSNFDYW

SEQ ID NO: 52142 - protein, 23 aa, Homo sapiens
CARDGRYCTFSGCYFLNFYMDVW

SEQ ID NO: 52143 - protein, 18 aa, Homo sapiens
CAREGYSGYDFKYYFDYW

SEQ ID NO: 52144 - protein, 27 aa, Homo sapiens
CARSRRINREITIFGVVTPAGDWFDPW

SEQ ID NO: 52145 - protein, 21 aa, Homo sapiens
CARDPGFYDGYSGYGPYFDYW

SEQ ID NO: 52146 - protein, 16 aa, Homo sapiens
CAKDILPSSSGGVDYW

SEQ ID NO: 52147 - protein, 15 aa, Homo sapiens
CARDRGDPQGYFDLW

SEQ ID NO: 52148 - protein, 17 aa, Homo sapiens
CASQRVPYGDYGTLDYW

SEQ ID NO: 52149 - protein, 14 aa, Homo sapiens
CARGRDGYNPLDYW

SEQ ID NO: 52150 - protein, 22 aa, Homo sapiens
CAREVDSSGWYGVSREDAFDIW

SEQ ID NO: 52151 - protein, 20 aa, Homo sapiens
CARDYYGDQHPYYYYYMDVW

SEQ ID NO: 52152 - protein, 14 aa, Homo sapiens
CASGIAVAGPLDYW

SEQ ID NO: 52153 - protein, 15 aa, Homo sapiens
CATYGDSTDDAFDIW

SEQ ID NO: 52154 - protein, 19 aa, Homo sapiens
CARSIVVVPNSISNWFDPW

SEQ ID NO: 52155 - protein, 11 aa, Homo sapiens
CQQFNADPCTF

SEQ ID NO: 52156 - protein, 14 aa, Homo sapiens
CARDHSSGHYFVYW

SEQ ID NO: 52157 - protein, 17 aa, Homo sapiens
CARRSMEYSGYDLLDYW

SEQ ID NO: 52158 - protein, 26 aa, Homo sapiens
CARDGRDYYDFWSGYYNDYYYGMDVW

SEQ ID NO: 52159 - protein, 14 aa, Homo sapiens
CVRHLPYTGDFDYW

SEQ ID NO: 52160 - protein, 22 aa, Homo sapiens
CARERALDFGDGDYDYYGMDVW

SEQ ID NO: 52161 - protein, 20 aa, Homo sapiens
CARHPSVTSPGAFYWYFDLW

SEQ ID NO: 52162 - protein, 16 aa, Homo sapiens
CASSGWYDGYYYMDVW

SEQ ID NO: 52163 - protein, 18 aa, Homo sapiens
CARDRAEEDSSGYYQDYW

SEQ ID NO: 52164 - protein, 20 aa, Homo sapiens
CTSRDCSGSSCDWSPYFDYW

SEQ ID NO: 52165 - protein, 12 aa, Homo sapiens [sequence omitted]

SEQ ID NO: 52166 - protein, 20 aa, Homo sapiens
CARIYGSGSYPQLRNWFDPW

SEQ ID NO: 52167 - protein, 16 aa, Homo sapiens
CARGLKGYSNYVFDYW

SEQ ID NO: 52168 - protein, 26 aa, Homo sapiens
CASLGAAYDILTGYSGSHYYYGMDVW

SEQ ID NO: 52169 - protein, 22 aa, Homo sapiens
CARSIYGYSSSWYYYYYYMDVW

SEQ ID NO: 52170 - protein, 20 aa, Homo sapiens
CSRKENKFSTSWEIDGFDIW

SEQ ID NO: 52171 - protein, 21 aa, Homo sapiens
CARDLVTTTTIPVLRNYFDYW

SEQ ID NO: 52172 - protein, 24 aa, Homo sapiens
CATNDARWDIAARPQYYYYGMDVW

SEQ ID NO: 52173 - protein, 15 aa, Homo sapiens
CARPNWGSWGYFDYW

SEQ ID NO: 52174 - protein, 17 aa, Homo sapiens
CAREGGYEEEGGWFDPW

SEQ ID NO: 52175 - protein, 17 aa, Homo sapiens
CATILGGCSGGSCPDYW

SEQ ID NO: 52176 - protein, 21 aa, Homo sapiens
CARSAENYDFWSGYYLELDYW

SEQ ID NO: 52177 - protein, 19 aa, Homo sapiens
CARHERRWLQLQPGWFDPW

SEQ ID NO: 52178 - protein, 17 aa, Homo sapiens
CARDLQFWLPGSASDIW

SEQ ID NO: 52179 - protein, 14 aa, Homo sapiens
CARDSEIAAEFDYW

SEQ ID NO: 52180 - protein, 16 aa, Homo sapiens
CATAPSIAARYWFDPW

SEQ ID NO: 52181 - protein, 17 aa, Homo sapiens
CARVGANYGYVWWFDPW

SEQ ID NO: 52182 - protein, 19 aa, Homo sapiens
CARLVVVAATLGEYYFDYW

SEQ ID NO: 52183 - protein, 19 aa, Homo sapiens
CATRSPLGTTISVNYMDVW

SEQ ID NO: 52184 - protein, 24 aa, Homo sapiens
CARDQGDYDYIWGSYRRSDYFDYW

SEQ ID NO: 52185 - protein, 22 aa, Homo sapiens
CARHEIVVVVAATTEYNWFDPW

SEQ ID NO: 52186 - protein, 27 aa, Homo sapiens
CARDRELALEWLLFRDSTRYYYYMDVW

SEQ ID NO: 52187 - protein, 22 aa, Homo sapiens
CARVAPDIVVVPAAIHGAFDIW

SEQ ID NO: 52188 - protein, 18 aa, Homo sapiens
CARDRYGDSTLFNWFDPW

SEQ ID NO: 52189 - protein, 16 aa, Homo sapiens
CVLGLYDYYYYYMDVW

SEQ ID NO: 52190 - protein, 18 aa, Homo sapiens
CASYYDSSGYYQNWFDPW

SEQ ID NO: 52191 - protein, 20 aa, Homo sapiens
CASIPSDPQNALSYYYMDVW

SEQ ID NO: 52192 - protein, 19 aa, Homo sapiens
CARGTGYDFWSGYLPIDYW

SEQ ID NO: 52193 - protein, 20 aa, Homo sapiens
CARSYYDYIWGSYPYWFDPW

SEQ ID NO: 52194 - protein, 17 aa, Homo sapiens
CARGYSGRSYSTAFDHW

SEQ ID NO: 52195 - protein, 22 aa, Homo sapiens
CARAVVLITIFGVVTPGAFDIW

SEQ ID NO: 52196 - protein, 19 aa, Homo sapiens
CARDWSLQGVINSPLFDPW

SEQ ID NO: 52197 - protein, 20 aa, Homo sapiens
CARTSFTVVQGVIITSFHYW

SEQ ID NO: 52198 - protein, 24 aa, Homo sapiens
CARAPTSQGPRIFGVVIHTPFDYW

SEQ ID NO: 52199 - protein, 23 aa, Homo sapiens
CARDSRDLSVSPEWFPSEDFDYW

SEQ ID NO: 52200 - protein, 27 aa, Homo sapiens
CARDGLEVRGYSGYEGSWDYYYGMDVW

SEQ ID NO: 52201 - protein, 19 aa, Homo sapiens
CVSDAYCPGGVCQGGVDYW

SEQ ID NO: 52202 - protein, 23 aa, Homo sapiens
CARDLTVTTFSMSLHYYYGMDVW

SEQ ID NO: 52203 - protein, 18 aa, Homo sapiens
CARIAVTTFHYYYGMDVW

SEQ ID NO: 52204 - protein, 21 aa, Homo sapiens
CARRGPEYCSSINCWNWFDPW

SEQ ID NO: 52205 - protein, 17 aa, Homo sapiens
CASINLGYDFHYYMDVW

SEQ ID NO: 52206 - protein, 24 aa, Homo sapiens
CARDRSYCSGGSCYGDIEYYFDYW

SEQ ID NO: 52207 - protein, 19 aa, Homo sapiens
CARWYKSDWYLSGGAFNIW

SEQ ID NO: 52208 - protein, 13 aa, Homo sapiens
CARSSAWNDFDYW

SEQ ID NO: 52209 - protein, 13 aa, Homo sapiens
CARFLLDPYFDYW

SEQ ID NO: 52210 - protein, 14 aa, Homo sapiens
CAAGLFGVASSDYW

SEQ ID NO: 52211 - protein, 12 aa, Homo sapiens
CAREEFRFSDYW

SEQ ID NO: 52212 - protein, 15 aa, Homo sapiens
CARVDAPSAAAADYW

SEQ ID NO: 52213 - protein, 15 aa, Homo sapiens
CVHRAGVTKDAFDIW

SEQ ID NO: 52214 - protein, 17 aa, Homo sapiens
CARDLEYIAQPVGFDPW

SEQ ID NO: 52215 - protein, 19 aa, Homo sapiens
CARVNLGYSGWYSDAFDIW

SEQ ID NO: 52216 - protein, 20 aa, Homo sapiens
CARLLHLGELSLGFDAFDIW

SEQ ID NO: 52217 - protein, 22 aa, Homo sapiens
CARDKVTMVQGVIIYYYGMDVW

SEQ ID NO: 52218 - protein, 17 aa, Homo sapiens
CATGRGITMISGYFDYW

SEQ ID NO: 52219 - protein, 16 aa, Homo sapiens
CARGSFDSSGYTIDYW

SEQ ID NO: 52220 - protein, 16 aa, Homo sapiens
CATSGDQWLGDYFDYW

SEQ ID NO: 52221 - protein, 21 aa, Homo sapiens
CARQKFKVAVGGSIVGYFDVW

SEQ ID NO: 52222 - protein, 21 aa, Homo sapiens
CASEIGDYGGDSWAGWYFDLW

SEQ ID NO: 52223 - protein, 19 aa, Homo sapiens
CTRADYDYIWGSYPTADYW

SEQ ID NO: 52224 - protein, 18 aa, Homo sapiens
CARGPFVVTTDLWYFDLW

SEQ ID NO: 52225 - protein, 18 aa, Homo sapiens
CAREGSSSSEVHDAFDIW

SEQ ID NO: 52226 - protein, 20 aa, Homo sapiens
CARMVVYAIPDYYYYGMDVW

SEQ ID NO: 52227 - protein, 19 aa, Homo sapiens
CARDQSGGGDYAQYYFDYW

SEQ ID NO: 52228 - protein, 19 aa, Homo sapiens
CAGIESKWGDYGDYYFDYW

SEQ ID NO: 52229 - protein, 21 aa, Homo sapiens
CATLGGIAAAHLGGYYYMDVW

SEQ ID NO: 52230 - protein, 16 aa, Homo sapiens
CAHRPPLVWNGAFDIW

SEQ ID NO: 52231 - protein, 19 aa, Homo sapiens
CASSCRKGTLLCASYFDYW

SEQ ID NO: 52232 - protein, 18 aa, Homo sapiens
CARDDVASSGWYDAFDIW

SEQ ID NO: 52233 - protein, 21 aa, Homo sapiens
CASVREGYSPLNYYYYYMDVW

SEQ ID NO: 52234 - protein, 20 aa, Homo sapiens
CATVRGDKNIVATIGAFDYW

SEQ ID NO: 52235 - protein, 24 aa, Homo sapiens
CAKELGYCSGGSCYPNYYYGMDVW

SEQ ID NO: 52236 - protein, 25 aa, Homo sapiens
CARDKSAIDYDILTGYGYYYYMDVW

SEQ ID NO: 52237 - protein, 20 aa, Homo sapiens
CASAQEYLSSSWFFYAFDIW

SEQ ID NO: 52238 - protein, 16 aa, Homo sapiens
CAHRGQWLVRAAFDIW

SEQ ID NO: 52239 - protein, 19 aa, Homo sapiens
CARDLSEWELLAHDAFDIW

SEQ ID NO: 52240 - protein, 21 aa, Homo sapiens
CARDGPRDFWSGYWVWYFDLW

SEQ ID NO: 52241 - protein, 17 aa, Homo sapiens
CARGTGYDSSYLAFDIW

SEQ ID NO: 52242 - protein, 22 aa, Homo sapiens
CAKDGVGFWSGYYVPGYYMDVW

SEQ ID NO: 52243 - protein, 14 aa, Homo sapiens
CARESDYGDPLDYW

SEQ ID NO: 52244 - protein, 17 aa, Homo sapiens
CAVLLDSGYDWGYFDYW

SEQ ID NO: 52245 - protein, 20 aa, Homo sapiens
CASDFWSGYSRYQYYGMDVW

SEQ ID NO: 52246 - protein, 21 aa, Homo sapiens
CARDPSAYSGYAVIPSLSDYW

SEQ ID NO: 52247 - protein, 19 aa, Homo sapiens
CATHKSAYCGGDCPLFDYW

SEQ ID NO: 52248 - protein, 16 aa, Homo sapiens
CARVGFGVVYAPQDYW

SEQ ID NO: 52249 - protein, 12 aa, Homo sapiens
CVPKVVDDFDYW

SEQ ID NO: 52250 - protein, 16 aa, Homo sapiens
CARGRGQNYLDAFDMW

SEQ ID NO: 52251 - protein, 16 aa, Homo sapiens
CARASSSGWSREFDYW

SEQ ID NO: 52252 - protein, 18 aa, Homo sapiens
CARVRGTDDYGDYYFDYW

SEQ ID NO: 52253 - protein, 20 aa, Homo sapiens
CARDSSFPSSFDYGAEFDYW

SEQ ID NO: 52254 - protein, 21 aa, Homo sapiens
CEFPLGFLQSSYPKDRIFDPW

SEQ ID NO: 52255 - protein, 19 aa, Homo sapiens
CASSHFLLEYSSSSGIDYW

SEQ ID NO: 52256 - protein, 24 aa, Homo sapiens
CARDRRFLDDILTGYYGSYYMDVW

SEQ ID NO: 52257 - protein, 23 aa, Homo sapiens
CARRVAPHFYGDLPYYYYYMDVW

SEQ ID NO: 52258 - protein, 24 aa, Homo sapiens
CATSGETRITIFGVVTRYNWFDPW

SEQ ID NO: 52259 - protein, 14 aa, Homo sapiens
CCARVYGSDYLDYW

SEQ ID NO: 52260 - protein, 18 aa, Homo sapiens
CASNPPSYSSSWYYFDYW

SEQ ID NO: 52261 - protein, 24 aa, Homo sapiens
CARGPYYDFWSGTGGGRENWFDPW

SEQ ID NO: 52262 - protein, 21 aa, Homo sapiens
CARGGWDSSSSMKRTLWFDPW

SEQ ID NO: 52263 - protein, 20 aa, Homo sapiens
CARERSYDFWRDNDYYFDYW

SEQ ID NO: 52264 - protein, 19 aa, Homo sapiens
CARVHGDYFPTYYYYMDVW

SEQ ID NO: 52265 - protein, 18 aa, Homo sapiens
CAREYYCSGGSCSYFDYW

SEQ ID NO: 52266 - protein, 20 aa, Homo sapiens
CARERGGYGDFIASDAFDIW

SEQ ID NO: 52267 - protein, 20 aa, Homo sapiens
CARDEANGSGSYLGWYFDYW

SEQ ID NO: 52268 - protein, 22 aa, Homo sapiens
CARRYYDFWSGYYSPGGAFDIW

SEQ ID NO: 52269 - protein, 22 aa, Homo sapiens
CARDGGYSYGSGDYYYYGMDVW

SEQ ID NO: 52270 - protein, 13 aa, Homo sapiens
CSSGRWYWYFDLW

SEQ ID NO: 52271 - protein, 17 aa, Homo sapiens
CARGIWAAPFYYYIDLW

SEQ ID NO: 52272 - protein, 18 aa, Homo sapiens
CARDAVRYSSGWYYFDYW

SEQ ID NO: 52273 - protein, 16 aa, Homo sapiens
CARGPVVILNTDLDYW

SEQ ID NO: 52274 - protein, 23 aa, Homo sapiens
CARVGTYYYDSSGYYNPGDFDYW

SEQ ID NO: 52275 - protein, 17 aa, Homo sapiens
CARELYSNDDWDWFDPW

SEQ ID NO: 52276 - protein, 20 aa, Homo sapiens
CARSTVTNEGGYYYYGMDVW

SEQ ID NO: 52277 - protein, 23 aa, Homo sapiens
CAQLIMITFGGVIVKGFDWFDPW

SEQ ID NO: 52278 - protein, 16 aa, Homo sapiens
CARRGTISGGDWFDPW

SEQ ID NO: 52279 - protein, 15 aa, Homo sapiens
CATYPLYQDDAFDIW

SEQ ID NO: 52280 - protein, 26 aa, Homo sapiens
CARDGPLLRFLEWSPYGAPGDAFDIW

SEQ ID NO: 52281 - protein, 30 aa, Homo sapiens
CARDRGYRYYDFWSGYYTGIEHDHYYMDVW

SEQ ID NO: 52282 - protein, 16 aa, Homo sapiens
CAKLAIHDYGDYGDYW

SEQ ID NO: 52283 - protein, 16 aa, Homo sapiens
CARDPSTTVGNYFDYW

SEQ ID NO: 52284 - protein, 17 aa, Homo sapiens
CARSLYYYPPYYYMDVW

SEQ ID NO: 52285 - protein, 21 aa, Homo sapiens
CARSRPITISTRATTGPSDYW

SEQ ID NO: 52286 - protein, 14 aa, Homo sapiens
CGLSNYEGFFYDYW

SEQ ID NO: 52287 - protein, 24 aa, Homo sapiens
CARESGHNMITFGGVIVTSYFDYW

SEQ ID NO: 52288 - protein, 23 aa, Homo sapiens
CARGGWGELGYCSGGSCSWFDPW

SEQ ID NO: 52289 - protein, 17 aa, Homo sapiens
CARHANSGWLDDAFDIW

SEQ ID NO: 52290 - protein, 19 aa, Homo sapiens
CARMLCLEWLPQPYYFDYW

SEQ ID NO: 52291 - protein, 20 aa, Homo sapiens
CAKEIGDSSGYQGLDAFDIW

SEQ ID NO: 52292 - protein, 19 aa, Homo sapiens
CARDMGGMVVATRYYFDYW

SEQ ID NO: 52293 - protein, 21 aa, Homo sapiens
CARLGGFCSGGTCYDHHFDYW

SEQ ID NO: 52294 - protein, 16 aa, Homo sapiens
CARGGDNGGYDRFDWW

SEQ ID NO: 52295 - protein, 17 aa, Homo sapiens
CARDREVGYGDRYFDYW

SEQ ID NO: 52296 - protein, 27 aa, Homo sapiens
CARVDRPYYDFWSGYLPGYYYYGMDVW

SEQ ID NO: 52297 - protein, 24 aa, Homo sapiens
CARHPVAVAGTSSLGRGGNWFDPW

SEQ ID NO: 52298 - protein, 16 aa, Homo sapiens
CARSTVTTAGDAFDIW

SEQ ID NO: 52299 - protein, 19 aa, Homo sapiens
CARGNPDSSSWYGNWFDPW

SEQ ID NO: 52300 - protein, 22 aa, Homo sapiens
CARVAWAHCSGGSCYYYGMDVW

SEQ ID NO: 52301 - protein, 22 aa, Homo sapiens
CARGKDYDFWGSPHEQNWFDPW

SEQ ID NO: 52302 - protein, 22 aa, Homo sapiens
CASWPVPDFVVVLAIGRAFDVW

SEQ ID NO: 52303 - protein, 14 aa, Homo sapiens
CATRRRDSSGFDYW

SEQ ID NO: 52304 - protein, 25 aa, Homo sapiens
CVRARDGRDGFSGSSLLGPYFLDYW

SEQ ID NO: 52305 - protein, 20 aa, Homo sapiens
CASTVNYYDDSAYSTLFDYW

SEQ ID NO: 52306 - protein, 16 aa, Homo sapiens
CARVSTKKNQTPFDYW

SEQ ID NO: 52307 - protein, 17 aa, Homo sapiens
CARDMDWYSPEDAFDIW

SEQ ID NO: 52308 - protein, 23 aa, Homo sapiens
CAHSMGSSSWYTEDQEPYYFDYW

SEQ ID NO: 52309 - protein, 16 aa, Homo sapiens
CAALMHYYDNDAFDIW

SEQ ID NO: 52310 - protein, 19 aa, Homo sapiens
CARERDDFWSGYPQPLDYW

SEQ ID NO: 52311 - protein, 20 aa, Homo sapiens
CATESAVLRFLEWYHWFDPW

SEQ ID NO: 52312 - protein, 21 aa, Homo sapiens
CARGRQYYDILTGQMYYFDYW

SEQ ID NO: 52313 - protein, 24 aa, Homo sapiens
CATLRGRISGSDDLWYYYYGMDVW

SEQ ID NO: 52314 - protein, 16 aa, Homo sapiens
CASLGTILTGFPGDYW

SEQ ID NO: 52315 - protein, 15 aa, Homo sapiens
CAKAINSDFFYFDYW

SEQ ID NO: 52316 - protein, 16 aa, Homo sapiens
CARPGSTAPSTSFDYW

SEQ ID NO: 52317 - protein, 24 aa, Homo sapiens
CATQDYDSSGYYSRGWGYYYMDVW

SEQ ID NO: 52318 - protein, 19 aa, Homo sapiens
CARDIYCGDCSGHDAFDVW

SEQ ID NO: 52319 - protein, 14 aa, Homo sapiens
CARFGEAVAGNDYW

SEQ ID NO: 52320 - protein, 20 aa, Homo sapiens
CARDWAYSSSSGPTRWFDPW

SEQ ID NO: 52321 - protein, 15 aa, Homo sapiens
CARVTIFGVVIFDYW

SEQ ID NO: 52322 - protein, 20 aa, Homo sapiens
CAREHMSLDYGVRFAWFDPW

SEQ ID NO: 52323 - protein, 15 aa, Homo sapiens
CARGQQQLEDAFDIW

SEQ ID NO: 52324 - protein, 18 aa, Homo sapiens
CARHPRVSGYYTGAIDYW

SEQ ID NO: 52325 - protein, 21 aa, Homo sapiens
CARDLRFLEWLFYQEGAFDIW

SEQ ID NO: 52326 - protein, 26 aa, Homo sapiens
CARGGYCSSTSCNTPSNYYYYYMDVW

SEQ ID NO: 52327 - protein, 13 aa, Homo sapiens
CAAWDDGLSVALF

SEQ ID NO: 52328 - protein, 26 aa, Homo sapiens
CARSGWGSCSGGSCQFPYYYYYMDVW

SEQ ID NO: 52329 - protein, 25 aa, Homo sapiens
CARDPSITIFGVVSNYYYYYGMDVW

SEQ ID NO: 52330 - protein, 16 aa, Homo sapiens
CAAETEAARPGMGDYW

SEQ ID NO: 52331 - protein, 30 aa, Homo sapiens
CARNGPMGHYDILTGYLTSRNLYYYYMDVW

SEQ ID NO: 52332 - protein, 16 aa, Homo sapiens
CATGPVAGREWWFDPW

SEQ ID NO: 52333 - protein, 15 aa, Homo sapiens
CARTYYGSGIHFDYW

SEQ ID NO: 52334 - protein, 21 aa, Homo sapiens
CAKGMVEWIAEGSVGSAFDIW

SEQ ID NO: 52335 - protein, 22 aa, Homo sapiens
CARDYRGYCSGGSCQSGSVDYW

SEQ ID NO: 52336 - protein, 17 aa, Homo sapiens
CARIFASDVSGLYFDYW

SEQ ID NO: 52337 - protein, 17 aa, Homo sapiens
CARQGVVYSGYDHFDYW

SEQ ID NO: 52338 - protein, 17 aa, Homo sapiens
CARDREAVAGMGGLDYW

SEQ ID NO: 52339 - protein, 22 aa, Homo sapiens
CARDPHFDSGSYYGRGSAFDIW

SEQ ID NO: 52340 - protein, 17 aa, Homo sapiens
CAREMYSSSPDCWFDPW

SEQ ID NO: 52341 - protein, 24 aa, Homo sapiens
CAREPVVIAAIVGAPLGTSHFDYW

SEQ ID NO: 52342 - protein, 17 aa, Homo sapiens
CASNLDYGGNSALGDYW

SEQ ID NO: 52343 - protein, 12 aa, Homo sapiens
CARGYEWFCDYW

SEQ ID NO: 52344 - protein, 19 aa, Homo sapiens
CAGGATIFGVAYPYYFDFW

SEQ ID NO: 52345 - protein, 18 aa, Homo sapiens
CARGRTTIFGVVTQLDYW

SEQ ID NO: 52346 - protein, 18 aa, Homo sapiens
CARRRSPSGGTTPWFDPW

SEQ ID NO: 52347 - protein, 22 aa, Homo sapiens
CARVLEYSSSSGLDYYYGMDVW

SEQ ID NO: 52348 - protein, 24 aa, Homo sapiens
CARPPRDYYDSSGTTIGENYFDYW

SEQ ID NO: 52349 - protein, 19 aa, Homo sapiens
CAHRGLNIAAPGNDAFDIW

SEQ ID NO: 52350 - protein, 18 aa, Homo sapiens
CARDFDAFWSGYRIFDYW

SEQ ID NO: 52351 - protein, 19 aa, Homo sapiens
CAREGDFWSGYGLYYMDVW

SEQ ID NO: 52352 - protein, 18 aa, Homo sapiens
CARYPHQGYLSAWYADYW

SEQ ID NO: 52353 - protein, 17 aa, Homo sapiens
CARVDSGDNYAGQMDYW

SEQ ID NO: 52354 - protein, 15 aa, Homo sapiens
CARDYDSSEGFFAYW

SEQ ID NO: 52355 - protein, 21 aa, Homo sapiens
CARDRGYDFWSGHNRGGFDYW

SEQ ID NO: 52356 - protein, 18 aa, Homo sapiens
CARDQVDYDFWSGYLDYW

SEQ ID NO: 52357 - protein, 22 aa, Homo sapiens
CARDSDIVVVVAAMGLNAFDIW

SEQ ID NO: 52358 - protein, 15 aa, Homo sapiens
CARQAVSGTSWFDPW

SEQ ID NO: 52359 - protein, 17 aa, Homo sapiens
CAHLRGGVVIIGDFDYW

SEQ ID NO: 52360 - protein, 23 aa, Homo sapiens
CARSPWAYCGGDCYFPGGYFDYW

SEQ ID NO: 52361 - protein, 17 aa, Homo sapiens
CARVPLDAKGNNWLDPW

SEQ ID NO: 52362 - protein, 23 aa, Homo sapiens
CASWTNYYDSSGYYVAEYYFDYW

SEQ ID NO: 52363 - protein, 18 aa, Homo sapiens
CARDGLMGSSSWYPSDYW

SEQ ID NO: 52364 - protein, 21 aa, Homo sapiens
CATLPMVTTKPHKYYYYMDVW

SEQ ID NO: 52365 - protein, 16 aa, Homo sapiens
CAACGFWSGYSSFDYW

SEQ ID NO: 52366 - protein, 16 aa, Homo sapiens
CARMHAAAADYYFDYW

SEQ ID NO: 52367 - protein, 21 aa, Homo sapiens
CAHSRAYMITFGGVIGHFDYW

SEQ ID NO: 52368 - protein, 20 aa, Homo sapiens
CARDLPLSTYPQLENYFDYW

SEQ ID NO: 52369 - protein, 20 aa, Homo sapiens
CARAFYDFWSGYHSREFDYW

SEQ ID NO: 52370 - protein, 21 aa, Homo sapiens
CARARSQKLIAGPDRTPFDYW

SEQ ID NO: 52371 - protein, 28 aa, Homo sapiens
CARSGWGPLLGMAYGSGSTYYYYGMDVW

SEQ ID NO: 52372 - protein, 17 aa, Homo sapiens
CARATILDIVWGVFDYW

SEQ ID NO: 52373 - protein, 16 aa, Homo sapiens
CAHRPSGYDRGYFDYW

SEQ ID NO: 52374 - protein, 19 aa, Homo sapiens
CARSPPYFTMIVVVDFDYW

SEQ ID NO: 52375 - protein, 14 aa, Homo sapiens
CAHKHVVTVGFDYW

SEQ ID NO: 52376 - protein, 18 aa, Homo sapiens
CAHSTSPRIAAAEHFDYW

SEQ ID NO: 52377 - protein, 17 aa, Homo sapiens
CARHSVDYGDYGSLDYW

SEQ ID NO: 52378 - protein, 19 aa, Homo sapiens
CARHLSGSSGWELYYFDYW

SEQ ID NO: 52379 - protein, 29 aa, Homo sapiens
CARHVITMVQGVIITWPPEDYYYYYMDVW

SEQ ID NO: 52380 - protein, 18 aa, Homo sapiens
CARAGRGIFGVVIHFDYW

SEQ ID NO: 52381 - protein, 21 aa, Homo sapiens
CARDDGGDEGYYYDSGAFDIW

SEQ ID NO: 52382 - protein, 31 aa, Homo sapiens
CARDPYKNQYDFWSGYYTAEPLYYYYGMDVW

SEQ ID NO: 52383 - protein, 18 aa, Homo sapiens
CARDLALWEQWHGGIDYW

SEQ ID NO: 52384 - protein, 11 aa, Homo sapiens
CVHREGAFDVW

SEQ ID NO: 52385 - protein, 11 aa, Homo sapiens
CTVATIWGDYW

SEQ ID NO: 52386 - protein, 18 aa, Homo sapiens
CASVNSPYYYDSSVLDYW

SEQ ID NO: 52387 - protein, 17 aa, Homo sapiens
CANLQAFYDLPDAFDMW

SEQ ID NO: 52388 - protein, 23 aa, Homo sapiens
CARSVEGIDLVGGLRLTGWFDPW

SEQ ID NO: 52389 - protein, 23 aa, Homo sapiens
CARDEVVVPAAMLDYYYYGMDVW

SEQ ID NO: 52390 - protein, 20 aa, Homo sapiens
CARLEVLWTYYSSGWYLVYW

SEQ ID NO: 52391 - protein, 18 aa, Homo sapiens
CAKDGYSYGYVVRLFDYW

SEQ ID NO: 52392 - protein, 31 aa, Homo sapiens
CARDQVSRRVTMVRGVITGYESTKNDAFDIW

SEQ ID NO: 52393 - protein, 22 aa, Homo sapiens
CARIKSDYYDSSGYSVLWFDPW

SEQ ID NO: 52394 - protein, 25 aa, Homo sapiens
CARDRYYDILTGSPGPYYYYGMDVW

SEQ ID NO: 52395 - protein, 21 aa, Homo sapiens
CAKGWPYSSGYYSLGVGYDYW

SEQ ID NO: 52396 - protein, 16 aa, Homo sapiens
CARPYGSAYHEAFDIW

SEQ ID NO: 52397 - protein, 23 aa, Homo sapiens
CARHSRGSHYDDTGYAADPFDIW

SEQ ID NO: 52398 - protein, 24 aa, Homo sapiens
CAAASGYCSSTSCYNYYYYGMDVW

SEQ ID NO: 52399 - protein, 21 aa, Homo sapiens
CVRGGPTYYYDSGSYPIFDYW

SEQ ID NO: 52400 - protein, 14 aa, Homo sapiens
CTTNSGYDLLFYYW

SEQ ID NO: 52401 - protein, 23 aa, Homo sapiens
CARDSGGPTHSDADNMVQGIDYW

SEQ ID NO: 52402 - protein, 31 aa, Homo sapiens
CARDSGPYYDFWSGYYMRTERGPGTNWFDPW

SEQ ID NO: 52403 - protein, 13 aa, Homo sapiens
CARIETGLSFDYW

SEQ ID NO: 52404 - protein, 27 aa, Homo sapiens
CARGVEYGDYDYIWGSYRPISEYFQHW

SEQ ID NO: 52405 - protein, 23 aa, Homo sapiens
CARDGAGPSTIFGPPPGDWFDPW

SEQ ID NO: 52406 - protein, 21 aa, Homo sapiens
CARDSSPGRLSSSWYYAFDIW

SEQ ID NO: 52407 - protein, 20 aa, Homo sapiens
CAREPINCSGGSCYSPFDYW

SEQ ID NO: 52408 - protein, 18 aa, Homo sapiens
CARDTAKLEPAFGGFDPW

SEQ ID NO: 52409 - protein, 15 aa, Homo sapiens
CAKITTVTTGGVDYW

SEQ ID NO: 52410 - protein, 25 aa, Homo sapiens
CARGAYCGGDCYLAPLYYYYYMDVW

SEQ ID NO: 52411 - protein, 15 aa, Homo sapiens
CSGGSCYPPVYMDVW

SEQ ID NO: 52412 - protein, 20 aa, Homo sapiens
CARMAMTTVTTYYYYGMDVW

SEQ ID NO: 52413 - protein, 21 aa, Homo sapiens
CAHMFDFWSGYGANTWWFDPW

SEQ ID NO: 52414 - protein, 23 aa, Homo sapiens
CARVVSPLGQPLVPKTRGWFDPW

SEQ ID NO: 52415 - protein, 19 aa, Homo sapiens
CARDKHSSGYYPPKAFDYW

SEQ ID NO: 52416 - protein, 21 aa, Homo sapiens
CAREAYCSGGSCFEPDAFDIW

SEQ ID NO: 52417 - protein, 17 aa, Homo sapiens
CATGPPVATINNWFDPW

SEQ ID NO: 52418 - protein, 18 aa, Homo sapiens
CAHSPHPAVAGTRWFDPW

SEQ ID NO: 52419 - protein, 15 aa, Homo sapiens
CAHRGSWNYAAFDYW

SEQ ID NO: 52420 - protein, 16 aa, Homo sapiens
CATVFAYDTRKANDYW

SEQ ID NO: 52421 - protein, 26 aa, Homo sapiens
CARDRGEDIVVVPAAIGTEGNWFDPW

SEQ ID NO: 52422 - protein, 18 aa, Homo sapiens
CAREVEGAYGLPGYFHYW

SEQ ID NO: 52423 - protein, 18 aa, Homo sapiens
CAKNLEMATIREDAFDIW

SEQ ID NO: 52424 - protein, 16 aa, Homo sapiens
CARESSSGWYGFLDYW

SEQ ID NO: 52425 - protein, 18 aa, Homo sapiens
CARGGGATVTKWPNFDFW

SEQ ID NO: 52426 - protein, 17 aa, Homo sapiens
CATAYGDYGPGWYFDLW

SEQ ID NO: 52427 - protein, 15 aa, Homo sapiens
CAKLWYDYGDSADYW

SEQ ID NO: 52428 - protein, 18 aa, Homo sapiens
CARHVLRYGGWGADFDYW

SEQ ID NO: 52429 - protein, 18 aa, Homo sapiens
CARGGPGAQDTLKSFDYW

SEQ ID NO: 52430 - protein, 20 aa, Homo sapiens
CATVVAYYYDSSGSLTLDYW

SEQ ID NO: 52431 - protein, 28 aa, Homo sapiens
CARNLPYVDIVATIMAPHAYYYYGMDVW

SEQ ID NO: 52432 - protein, 19 aa, Homo sapiens
CATTAGRYSSGWYSYFDLW

SEQ ID NO: 52433 - protein, 18 aa, Homo sapiens
CAVQRITIFGVVIIEDYW

SEQ ID NO: 52434 - protein, 16 aa, Homo sapiens
CARATRESGVYFFDYW

SEQ ID NO: 52435 - protein, 25 aa, Homo sapiens
CARALAERYYDSSGVPTDEYYFDYW

SEQ ID NO: 52436 - protein, 19 aa, Homo sapiens
CARDSPDYGDYDPNWFDPW

SEQ ID NO: 52437 - protein, 17 aa, Homo sapiens
CARGSSMTTVTTSFHYW

SEQ ID NO: 52438 - protein, 16 aa, Homo sapiens
CTTDPDFWSGNWLDPW

SEQ ID NO: 52439 - protein, 17 aa, Homo sapiens
CARLRGYDPARYYFDYW

SEQ ID NO: 52440 - protein, 16 aa, Homo sapiens
CASEGSMVATYYFDYW

SEQ ID NO: 52441 - protein, 20 aa, Homo sapiens
CARARIMITFGGVVGYFDYW

SEQ ID NO: 52442 - protein, 17 aa, Homo sapiens
CARDSSYYGGVGAFDIW

SEQ ID NO: 52443 - protein, 23 aa, Homo sapiens
CASDPTVYGPGGSRPYYYGMDVW

SEQ ID NO: 52444 - protein, 17 aa, Homo sapiens
CARSRHYYDSDDAFDIW

SEQ ID NO: 52445 - protein, 15 aa, Homo sapiens
CARTDAVAGSWFDPW

SEQ ID NO: 52446 - protein, 22 aa, Homo sapiens
CARSYSSSWSPLTRRYWYFDLW

SEQ ID NO: 52447 - protein, 23 aa, Homo sapiens
CAREFSYDFWSAPPPRLYYMDVW

SEQ ID NO: 52448 - protein, 19 aa, Homo sapiens
CARGLAVEQELFEEQFDYW

SEQ ID NO: 52449 - protein, 16 aa, Homo sapiens
CARDPPEYSGYEFDYW

SEQ ID NO: 52450 - protein, 17 aa, Homo sapiens
CARDLTADILTGYYNYW

SEQ ID NO: 52451 - protein, 19 aa, Homo sapiens
CARIRRDFWSGYYVDFDYW

SEQ ID NO: 52452 - protein, 25 aa, Homo sapiens
CAKPADTYVLGMITFGGVIAPFDYW

SEQ ID NO: 52453 - protein, 22 aa, Homo sapiens
CARAALYYYDSSGYYPGNFDYW

SEQ ID NO: 52454 - protein, 16 aa, Homo sapiens
CAREDGTVTSGYFDYW

SEQ ID NO: 52455 - protein, 17 aa, Homo sapiens
CATGFAAPNDGEIFDYW

SEQ ID NO: 52456 - protein, 13 aa, Homo sapiens
CARELSSWPFDYW

SEQ ID NO: 52457 - protein, 23 aa, Homo sapiens
CARGGRDYDILTGYYYYYGMDVW

SEQ ID NO: 52458 - protein, 25 aa, Homo sapiens
CARLRSTGITIFGVETETYNWFDPW

SEQ ID NO: 52459 - protein, 17 aa, Homo sapiens
CSGSYWISPGDDAFDIW

SEQ ID NO: 52460 - protein, 24 aa, Homo sapiens
CARSPDYYDSSGYYQDRLNWFDPW

SEQ ID NO: 52461 - protein, 24 aa, Homo sapiens
CAREGIMITFGGVIAAGHGAFDIW

SEQ ID NO: 52462 - protein, 21 aa, Homo sapiens
CARDLTAVAEEAYYYYGMDVW

SEQ ID NO: 52463 - protein, 18 aa, Homo sapiens
CARESNTEPGTTGSVDYW

SEQ ID NO: 52464 - protein, 12 aa, Homo sapiens
CQQYYSALLTTF

SEQ ID NO: 52465 - protein, 18 aa, Homo sapiens
CAKDRESPTGDLGGFDYW

SEQ ID NO: 52466 - protein, 15 aa, Homo sapiens
CAKLGDEYSSSVDYW

SEQ ID NO: 52467 - protein, 19 aa, Homo sapiens
CARHGYSGYQSYYYGMDVW

SEQ ID NO: 52468 - protein, 19 aa, Homo sapiens
CARDGPPDGSSSWYYFDYW

SEQ ID NO: 52469 - protein, 26 aa, Homo sapiens
CARDWYPIDYGDYDPTYYYYYGMDVW

SEQ ID NO: 52470 - protein, 22 aa, Homo sapiens
CVKDPRVTIFGVVITTDAFDIW

SEQ ID NO: 52471 - protein, 20 aa, Homo sapiens
CAEDHYGSGSFFSHSDFDYW

SEQ ID NO: 52472 - protein, 14 aa, Homo sapiens
CVKMGNSWYEFDFW

SEQ ID NO: 52473 - protein, 14 aa, Homo sapiens
CASEITMVQGVDYW

SEQ ID NO: 52474 - protein, 19 aa, Homo sapiens
CARVKPHDFWSGYSNIDYW

SEQ ID NO: 52475 - protein, 15 aa, Homo sapiens
CARLCPPYRYSFDYW

SEQ ID NO: 52476 - protein, 18 aa, Homo sapiens
CARQWPDYGDYADTVDYW

SEQ ID NO: 52477 - protein, 26 aa, Homo sapiens
CARGNEYYDILTGYWLTRKSDAFDIW

SEQ ID NO: 52478 - protein, 17 aa, Homo sapiens
CAPSRGYYDSSGTFDYW

SEQ ID NO: 52479 - protein, 25 aa, Homo sapiens
CARDLYQSHEYCTGGVCYYYGMDVW

SEQ ID NO: 52480 - protein, 23 aa, Homo sapiens
CARVHCSSTSCYASYVHGWFDPW

SEQ ID NO: 52481 - protein, 20 aa, Homo sapiens
CAREYYDFWSGPAYYYMDVW

SEQ ID NO: 52482 - protein, 13 aa, Homo sapiens
CAKIPTRGAFDIW

SEQ ID NO: 52483 - protein, 20 aa, Homo sapiens
CARVDLDYGDYDPNWYFDLW

SEQ ID NO: 52484 - protein, 17 aa, Homo sapiens
CASGYSSGWYVSYFDYW

SEQ ID NO: 52485 - protein, 20 aa, Homo sapiens
CARRSVSNDHYPILYYFDSW

SEQ ID NO: 52486 - protein, 16 aa, Homo sapiens
CATGPAYNWNYYFDYW

SEQ ID NO: 52487 - protein, 19 aa, Homo sapiens
CTTDTYYDILTGYQIFDYW

SEQ ID NO: 52488 - protein, 18 aa, Homo sapiens
CARGENWSGYNLWYFDYW

SEQ ID NO: 52489 - protein, 17 aa, Homo sapiens
CARDFRYDFWSGPIDYW

SEQ ID NO: 52490 - protein, 21 aa, Homo sapiens
CARDSGYDFWSGYYISPFDYW

SEQ ID NO: 52491 - protein, 16 aa, Homo sapiens
CAHKSSSWSRGYFDYW

SEQ ID NO: 52492 - protein, 18 aa, Homo sapiens
CARLRGPLSGYDISIDYW

SEQ ID NO: 52493 - protein, 21 aa, Homo sapiens
CARCPTYCSSTSCYPTPVDYW

SEQ ID NO: 52494 - protein, 17 aa, Homo sapiens
CARGSGVVIIHEYFQHW

SEQ ID NO: 52495 - protein, 23 aa, Homo sapiens
CARHYYDSSGYYSNYYYYYMDVW

SEQ ID NO: 52496 - protein, 25 aa, Homo sapiens
CASSTRGYCSGGSCYSNYYYGMDVW

SEQ ID NO: 52497 - protein, 18 aa, Homo sapiens
CAREDLPLRYFDLSFDYW

SEQ ID NO: 52498 - protein, 16 aa, Homo sapiens
CARGVGGHIVNWFDPW

SEQ ID NO: 52499 - protein, 27 aa, Homo sapiens
CARDVPKYYDYIWGSYRYPLYYYMDVW

SEQ ID NO: 52500 - protein, 15 aa, Homo sapiens
CAKTNSGLTYYFDYW

SEQ ID NO: 52501 - protein, 16 aa, Homo sapiens
CARLAYYYDIRWFDPW

SEQ ID NO: 52502 - protein, 17 aa, Homo sapiens
CARDPRSYYDSIPFDYW

SEQ ID NO: 52503 - protein, 18 aa, Homo sapiens
CASCHDFWSGYDDAFDIW

SEQ ID NO: 52504 - protein, 17 aa, Homo sapiens
CARKVTIFGGLLWFDPW

SEQ ID NO: 52505 - protein, 22 aa, Homo sapiens
CARGLRYFDWLLYSPPTLFDYW

SEQ ID NO: 52506 - protein, 22 aa, Homo sapiens
CARQIMITFGGVISGLGYFDYW

SEQ ID NO: 52507 - protein, 18 aa, Homo sapiens
CAKVHPIWFRDTNWFDPW

SEQ ID NO: 52508 - protein, 17 aa, Homo sapiens
CARDYYDSSGSDYFDYW

SEQ ID NO: 52509 - protein, 17 aa, Homo sapiens
CAKSQERWLHYTPFHYW

SEQ ID NO: 52510 - protein, 17 aa, Homo sapiens
CAKVVLPSTTGVPFDYW

SEQ ID NO: 52511 - protein, 19 aa, Homo sapiens
CARGPDDYGGNLEYYFDYW

SEQ ID NO: 52512 - protein, 17 aa, Homo sapiens
CATAPAAGQRWNWFDPW

SEQ ID NO: 52513 - protein, 18 aa, Homo sapiens
CARILEAAAGTGSAFDIW

SEQ ID NO: 52514 - protein, 17 aa, Homo sapiens
CARGIDSGSLPWGGDYW

SEQ ID NO: 52515 - protein, 18 aa, Homo sapiens
CAVNRAPYHNDWYYFDYW

SEQ ID NO: 52516 - protein, 24 aa, Homo sapiens
CARILETPYGDYGHHRYYYGMDVW

SEQ ID NO: 52517 - protein, 16 aa, Homo sapiens
CARGGDGYSVTYFDYW

SEQ ID NO: 52518 - protein, 22 aa, Homo sapiens
CARALLGYCTGVLCYSSAFDIW

SEQ ID NO: 52519 - protein, 18 aa, Homo sapiens
CAILSITIFGVVDAFDIW

SEQ ID NO: 52520 - protein, 18 aa, Homo sapiens
CARGGIWGVGAPDAFDIW

SEQ ID NO: 52521 - protein, 16 aa, Homo sapiens
CVRDYTITSQDVFDIW

SEQ ID NO: 52522 - protein, 22 aa, Homo sapiens
CATIMQQLGKGAHHYYYGMDVW

SEQ ID NO: 52523 - protein, 22 aa, Homo sapiens
CARRHVMITFGGVIITDAFDIW

SEQ ID NO: 52524 - protein, 17 aa, Homo sapiens
CAKDQGWFRESLYFDYW

SEQ ID NO: 52525 - protein, 22 aa, Homo sapiens
CMQGTHCNFEDVWPLLKGIGYF

SEQ ID NO: 52526 - protein, 20 aa, Homo sapiens
CVTGLKRYSGSHFPGSFDYW

SEQ ID NO: 52527 - protein, 25 aa, Homo sapiens
CARRALGYCSSTSCYGTINNAFDIW

SEQ ID NO: 52528 - protein, 26 aa, Homo sapiens
CARCSWGRGGYCSGGSCPTYWYFDLW

SEQ ID NO: 52529 - protein, 19 aa, Homo sapiens
CARSTQETYGSGSHYNLYW

SEQ ID NO: 52530 - protein, 27 aa, Homo sapiens
CARDPQLAYYDILTGYPYYYYYGMDVW

SEQ ID NO: 52531 - protein, 19 aa, Homo sapiens
CARAPYYYDSSSEGGFDYW

SEQ ID NO: 52532 - protein, 12 aa, Homo sapiens
CQEYYSEPMCTF

SEQ ID NO: 52533 - protein, 19 aa, Homo sapiens
CARSCSGGSCYSEGWFDPW

SEQ ID NO: 52534 - protein, 20 aa, Homo sapiens
CAGEGGIVGATRYYYGMDVW

SEQ ID NO: 52535 - protein, 20 aa, Homo sapiens
CARIPLTQFPYYYYYGMDVW

SEQ ID NO: 52536 - protein, 14 aa, Homo sapiens
CARAQSPYTGIDYW

SEQ ID NO: 52537 - protein, 20 aa, Homo sapiens
CARDITGTTSEYYYYGMDVW

SEQ ID NO: 52538 - protein, 23 aa, Homo sapiens
CARRPLYYDFWSGYYKAGYFDYW

SEQ ID NO: 52539 - protein, 20 aa, Homo sapiens
CASTITGIPNGYYYYGMDVW

SEQ ID NO: 52540 - protein, 20 aa, Homo sapiens
CAKDGVQTMTIYYYYYMDVW

SEQ ID NO: 52541 - protein, 15 aa, Homo sapiens
CARDWLRPTHCLDYW

SEQ ID NO: 52542 - protein, 13 aa, Homo sapiens
CQQSYSTLRGWTF

SEQ ID NO: 52543 - protein, 27 aa, Homo sapiens
CARDGNYGDYVIGHFGPYYYYYYMDVW

SEQ ID NO: 52544 - protein, 18 aa, Homo sapiens
CAKDRSEDFWSGYFIDYW

SEQ ID NO: 52545 - protein, 18 aa, Homo sapiens
CARRRGWVDGTYETFDYW

SEQ ID NO: 52546 - protein, 19 aa, Homo sapiens
CARDWDFWSGEPLGYFDLW

SEQ ID NO: 52547 - protein, 16 aa, Homo sapiens
CAKYDSTGYYFFIDYW

SEQ ID NO: 52548 - protein, 20 aa, Homo sapiens
CARHQTPNDYGDVYDAFDIW

SEQ ID NO: 52549 - protein, 18 aa, Homo sapiens
CTTDQVAWYQPLPYFDHW

SEQ ID NO: 52550 - protein, 19 aa, Homo sapiens
CATSSPVHSSGWYHWFDPW

SEQ ID NO: 52551 - protein, 20 aa, Homo sapiens
CASPKSYRYSGYEIRAFDIW

SEQ ID NO: 52552 - protein, 41 aa, Homo sapiens
CTAYMELSSLGFEDTAIYYCARDIKPTRGSIFQYYYGMDVW

SEQ ID NO: 52553 - protein, 21 aa, Homo sapiens
CARQGYDYIWGSLMRYYMDVW

SEQ ID NO: 52554 - protein, 19 aa, Homo sapiens
CATQTYYYDSSGYFPFGYW

SEQ ID NO: 52555 - protein, 17 aa, Homo sapiens
CARDYCSGGKCYQTDYW

SEQ ID NO: 52556 - protein, 18 aa, Homo sapiens
CAHRRFSITIFDNWFDPW

SEQ ID NO: 52557 - protein, 23 aa, Homo sapiens
CASTSQDRITIFGGYYYYGMDVW

SEQ ID NO: 52558 - protein, 21 aa, Homo sapiens
CARAPHYYDSSGYANYAFDIW

SEQ ID NO: 52559 - protein, 23 aa, Homo sapiens
CARDSWEWLLYRYDYYYYGMDVW

SEQ ID NO: 52560 - protein, 18 aa, Homo sapiens
CAKDAPYSSGWHSHIDYW

SEQ ID NO: 52561 - protein, 25 aa, Homo sapiens
CARLGYCSSTSCRRDPDYYYGMDVW

SEQ ID NO: 52562 - protein, 22 aa, Homo sapiens
CARDLAQGASAYGGNSDAFDIW

SEQ ID NO: 52563 - protein, 13 aa, Homo sapiens
CARDLSGYPIDYW

SEQ ID NO: 52564 - protein, 12 aa, Homo sapiens [sequence omitted]

SEQ ID NO: 52565 - protein, 16 aa, Homo sapiens
CATSPGILTTDWFDPW

SEQ ID NO: 52566 - protein, 18 aa, Homo sapiens
CASNAGPYSNWVRSFDYW

SEQ ID NO: 52567 - protein, 22 aa, Homo sapiens
CARAGGYNFWRTDYWANWFDPW

SEQ ID NO: 52568 - protein, 19 aa, Homo sapiens
CARHVVVVVPAAIFWFDPW

SEQ ID NO: 52569 - protein, 20 aa, Homo sapiens
CARGGLRYFDWLLPDHFDYW

SEQ ID NO: 52570 - protein, 19 aa, Homo sapiens
CARLANGYGDSGQWYFDLW

SEQ ID NO: 52571 - protein, 25 aa, Homo sapiens
CASTMTTLENNDYGDYVIPSGVDYW

SEQ ID NO: 52572 - protein, 22 aa, Homo sapiens
CARDPYYYDSSGYYYHDAFDIW

SEQ ID NO: 52573 - protein, 19 aa, Homo sapiens
CARDLGYYSSSWIDAFDIW

SEQ ID NO: 52574 - protein, 16 aa, Homo sapiens
CVVLWFREPARAFDIW

SEQ ID NO: 52575 - protein, 18 aa, Homo sapiens
CARAAVVVPAAMDWFDPW

SEQ ID NO: 52576 - protein, 21 aa, Homo sapiens
CASRGYCTGGVCPAEDGFDIW

SEQ ID NO: 52577 - protein, 22 aa, Homo sapiens
CASLPQLTYYYDSSGYYLNDYW

SEQ ID NO: 52578 - protein, 25 aa, Homo sapiens
CARDPTYIAVAEPEQYYYYYGMDVW

SEQ ID NO: 52579 - protein, 18 aa, Homo sapiens
CAREGAMVTHDYNWFDPW

SEQ ID NO: 52580 - protein, 20 aa, Homo sapiens
CARQVVQDYDSSGYIAFDIW

SEQ ID NO: 52581 - protein, 12 aa, Homo sapiens
CARHGNHNFEYW

SEQ ID NO: 52582 - protein, 12 aa, Homo sapiens [sequence omitted]

SEQ ID NO: 52583 - protein, 19 aa, Homo sapiens
CARAVEYNWNDGGGCFDYW

SEQ ID NO: 52584 - protein, 15 aa, Homo sapiens
CAKLEAAAGLGTDYW

SEQ ID NO: 52585 - protein, 15 aa, Homo sapiens
CTRDPPNDFDAFDIW

SEQ ID NO: 52586 - protein, 23 aa, Homo sapiens
CARLYADYGDYVGYYYYYGMDVW

SEQ ID NO: 52587 - protein, 21 aa, Homo sapiens
CARGHKYSNYVGYYYYYMDVW

SEQ ID NO: 52588 - protein, 19 aa, Homo sapiens
CARDRSGSYFGSLERFDYW

SEQ ID NO: 52589 - protein, 16 aa, Homo sapiens
CARDSEEYSYGFFDYW

SEQ ID NO: 52590 - protein, 21 aa, Homo sapiens
CARSPPYYYGSGSYYSHFDYW

SEQ ID NO: 52591 - protein, 13 aa, Homo sapiens
CARVVSGPVQDYW

SEQ ID NO: 52592 - protein, 17 aa, Homo sapiens
CARSDYSSSSLLWFDPW

SEQ ID NO: 52593 - protein, 17 aa, Homo sapiens
CATDGVDMAISGAFDIW

SEQ ID NO: 52594 - protein, 21 aa, Homo sapiens
CTTLYYDYIWGSYHEYYFDYW

SEQ ID NO: 52595 - protein, 17 aa, Homo sapiens
CARHGLKTAYYYYMDVW

SEQ ID NO: 52596 - protein, 17 aa, Homo sapiens
CARDGYSSSWTLDVDYW

SEQ ID NO: 52597 - protein, 18 aa, Homo sapiens
CARDSDPPLSGNDAFDIW

SEQ ID NO: 52598 - protein, 14 aa, Homo sapiens
CGGSNYYGDAFDIW

SEQ ID NO: 52599 - protein, 22 aa, Homo sapiens
CAKDQYSGYEQGYYYYYGMDVW

SEQ ID NO: 52600 - protein, 20 aa, Homo sapiens
CALTRRITIFENYYYGMDVW

SEQ ID NO: 52601 - protein, 14 aa, Homo sapiens
CARGQGAARRFDSW

SEQ ID NO: 52602 - protein, 24 aa, Homo sapiens
CARDLIAIDGDPGPPPYYYYMDVW

SEQ ID NO: 52603 - protein, 17 aa, Homo sapiens
CARGLTIFGMAPYFDYW

SEQ ID NO: 52604 - protein, 17 aa, Homo sapiens
CARSGDYVYYYYYMDVW

SEQ ID NO: 52605 - protein, 12 aa, Homo sapiens
CASGLRWHFDYW

SEQ ID NO: 52606 - protein, 16 aa, Homo sapiens
CARDFRSVIADAFDIW

SEQ ID NO: 52607 - protein, 20 aa, Homo sapiens
CARVRTLVDSSGYSNWFDPW

SEQ ID NO: 52608 - protein, 17 aa, Homo sapiens
CAKDLTDYGDFMGFDYW

SEQ ID NO: 52609 - protein, 19 aa, Homo sapiens
CARLEVSGNYYRYNCFDPW

SEQ ID NO: 52610 - protein, 23 aa, Homo sapiens
CARDIDYAAADRGGYYYYGMDVW

SEQ ID NO: 52611 - protein, 27 aa, Homo sapiens
CARDGRYYDFWSGYYPPIYYYYGMDVW

SEQ ID NO: 52612 - protein, 22 aa, Homo sapiens
CARTAVLEWLLYGFGFRWFDPW

SEQ ID NO: 52613 - protein, 17 aa, Homo sapiens
CAVMVQGVIIGSYFDYW

SEQ ID NO: 52614 - protein, 18 aa, Homo sapiens
CASLGGYYLGLSVAFDIW

SEQ ID NO: 52615 - protein, 18 aa, Homo sapiens
CARVTIAATTMYWYFDLW

SEQ ID NO: 52616 - protein, 17 aa, Homo sapiens
CAKVLQGAGTTWDFDCW

SEQ ID NO: 52617 - protein, 21 aa, Homo sapiens
CARDLNYFDSSASDSPAGDIW

SEQ ID NO: 52618 - protein, 21 aa, Homo sapiens
CARDRGAPIAAAPHGGWFDPW

SEQ ID NO: 52619 - protein, 21 aa, Homo sapiens
CARSGDYYGSGSYSTNWFDPW

SEQ ID NO: 52620 - protein, 16 aa, Homo sapiens
CAKVRTVTTLTYFDYW

SEQ ID NO: 52621 - protein, 22 aa, Homo sapiens
CATDPRYCSSTSCYNAGWFDPW

SEQ ID NO: 52622 - protein, 24 aa, Homo sapiens
CARSHTYYDILTGRYYYYYYMDVW

SEQ ID NO: 52623 - protein, 17 aa, Homo sapiens
CTKDPSPTPLTWYFDLW

SEQ ID NO: 52624 - protein, 21 aa, Homo sapiens
CARDLGITIFGVVYYYYMDVW

SEQ ID NO: 52625 - protein, 13 aa, Homo sapiens
CISSPRPDYADCW

SEQ ID NO: 52626 - protein, 27 aa, Homo sapiens
CARDSFVDWAFSMVQGVIITLDAFDIW

SEQ ID NO: 52627 - protein, 20 aa, Homo sapiens
CARVQVYDYIWGSYRGFDYW

SEQ ID NO: 52628 - protein, 14 aa, Homo sapiens
CARDQGYQEPFDYW

SEQ ID NO: 52629 - protein, 18 aa, Homo sapiens
CAKDLMVFVRAAAVIDYW

SEQ ID NO: 52630 - protein, 21 aa, Homo sapiens
CARLDVEVVIPGTDPDAFDIW

SEQ ID NO: 52631 - protein, 24 aa, Homo sapiens
CARDSRSTEPTYYYDSSGYPFDYW

SEQ ID NO: 52632 - protein, 17 aa, Homo sapiens
CAREGDILTGEGLFDYW

SEQ ID NO: 52633 - protein, 14 aa, Homo sapiens
CARISPLEYYMDVW

SEQ ID NO: 52634 - protein, 20 aa, Homo sapiens
CARHDSSGYGFWSGYRFDPW

SEQ ID NO: 52635 - protein, 18 aa, Homo sapiens
CARRDDYGDYGRGAFDIW

SEQ ID NO: 52636 - protein, 14 aa, Homo sapiens
CARQLVAAGITDYW

SEQ ID NO: 52637 - protein, 27 aa, Homo sapiens
CARGLRYFDWLLLNPGARHYYYGMDVW

SEQ ID NO: 52638 - protein, 22 aa, Homo sapiens
CARSYYDSSGYPCPLCYAFDIW

SEQ ID NO: 52639 - protein, 16 aa, Homo sapiens
CARGDRMVQGDQFDYW

SEQ ID NO: 52640 - protein, 23 aa, Homo sapiens
CARVKNRPLIVVPVGYYYYMDVW

SEQ ID NO: 52641 - protein, 21 aa, Homo sapiens
CARFRDYGDYVGPFSGRFDPW

SEQ ID NO: 52642 - protein, 26 aa, Homo sapiens
CARNFQNGDYDGMPAHTTYYYGMDVW

SEQ ID NO: 52643 - protein, 16 aa, Homo sapiens
CAHTVTTVTNYYFDYW

SEQ ID NO: 52644 - protein, 26 aa, Homo sapiens
CAREGLGYYDFWSGYATIKQRAFDYW

SEQ ID NO: 52645 - protein, 18 aa, Homo sapiens
CARRRGSDYGDYAGLDYW

SEQ ID NO: 52646 - protein, 19 aa, Homo sapiens
CAMSGATPRPYYYYGMDVW

SEQ ID NO: 52647 - protein, 25 aa, Homo sapiens
CARDLYKTYDYIWGSYRTYYGMDVW

SEQ ID NO: 52648 - protein, 25 aa, Homo sapiens
CARGGWRDSNYDEATDYYYYYMDVW

SEQ ID NO: 52649 - protein, 19 aa, Homo sapiens
CASQITRFCGTGRCYFDYW

SEQ ID NO: 52650 - protein, 18 aa, Homo sapiens
CARGLDWGYDFRVSFDYW

SEQ ID NO: 52651 - protein, 19 aa, Homo sapiens
CARAVTLTTYKSYYYMDVW

SEQ ID NO: 52652 - protein, 23 aa, Homo sapiens
CARIALDYDYIWGSYRYYWFDPW

SEQ ID NO: 52653 - protein, 16 aa, Homo sapiens
CAKLIAVDSPGAFDIW

SEQ ID NO: 52654 - protein, 20 aa, Homo sapiens
CARHLGGSRGLVHFWWFDPW

SEQ ID NO: 52655 - protein, 14 aa, Homo sapiens
CARVTRRFHGFDPW

SEQ ID NO: 52656 - protein, 18 aa, Homo sapiens
CARDKIAAAGQTDWFDPW

SEQ ID NO: 52657 - protein, 24 aa, Homo sapiens
CARLEARQHDYIWGSYQLDAFDIW

SEQ ID NO: 52658 - protein, 19 aa, Homo sapiens
CAREAASITMIVVPNFDYW

SEQ ID NO: 52659 - protein, 19 aa, Homo sapiens
CATLGGFLEWSGGYYMDVW

SEQ ID NO: 52660 - protein, 22 aa, Homo sapiens
CASRLAYCGGDCYSRLGIIDYW

SEQ ID NO: 52661 - protein, 20 aa, Homo sapiens
CARDLPYCGGDCPLENIDYW

SEQ ID NO: 52662 - protein, 19 aa, Homo sapiens
CARALWGSGIVYYYYMDVW

SEQ ID NO: 52663 - protein, 21 aa, Homo sapiens
CARIPTVTEDRYFYYYYMDVW

SEQ ID NO: 52664 - protein, 17 aa, Homo sapiens
CARVTGVATIIAPLDYW

SEQ ID NO: 52665 - protein, 16 aa, Homo sapiens
CARLWFREPSRWFDPW

SEQ ID NO: 52666 - protein, 11 aa, Homo sapiens
CLAAAAPFDYW

SEQ ID NO: 52667 - protein, 16 aa, Homo sapiens
CARVEGGNPVWYFDLW

SEQ ID NO: 52668 - protein, 19 aa, Homo sapiens
CAKLAVVVPSAPHDAFDIW

SEQ ID NO: 52669 - protein, 21 aa, Homo sapiens
CAREGKSSWAGVYYYYYMDVW

SEQ ID NO: 52670 - protein, 18 aa, Homo sapiens
CATAPVLVDSSSGWFDPW

SEQ ID NO: 52671 - protein, 14 aa, Homo sapiens
CQSYDSSNGPHWVF

SEQ ID NO: 52672 - protein, 20 aa, Homo sapiens
CASTSRRGLHDYGDYYFDYW

SEQ ID NO: 52673 - protein, 15 aa, Homo sapiens
CAEIASSYLPYFDYW

SEQ ID NO: 52674 - protein, 19 aa, Homo sapiens
CARHAMWELRPTVRAFDIW

SEQ ID NO: 52675 - protein, 15 aa, Homo sapiens
CAHNPYSSSLHFDNW

SEQ ID NO: 52676 - protein, 19 aa, Homo sapiens
CARFGPMVQGVISGAIDYW

SEQ ID NO: 52677 - protein, 30 aa, Homo sapiens
CASQLVIVVVPAAHVADQQPNYYYYGMDVW

SEQ ID NO: 52678 - protein, 18 aa, Homo sapiens
CARMKWDILTGSYYFDYW

SEQ ID NO: 52679 - protein, 17 aa, Homo sapiens
CARHGGSSWSPPYFDYW

SEQ ID NO: 52680 - protein, 25 aa, Homo sapiens
CARDLDSIRFLEWVGDYYYYGMDVW

SEQ ID NO: 52681 - protein, 17 aa, Homo sapiens
CARDIETTVVTQGLDYW

SEQ ID NO: 52682 - protein, 17 aa, Homo sapiens
CARDLHDYGDYRRFDYW

SEQ ID NO: 52683 - protein, 18 aa, Homo sapiens
CARVVMATISRYYYMDVW

SEQ ID NO: 52684 - protein, 19 aa, Homo sapiens
CARTIYNWNPEYYYGMDVW

SEQ ID NO: 52685 - protein, 18 aa, Homo sapiens
CAKDRSWYYYDSSGLDYW

SEQ ID NO: 52686 - protein, 14 aa, Homo sapiens
CAKFADSGSRHDYW

SEQ ID NO: 52687 - protein, 27 aa, Homo sapiens
CLRVEDTDIYYCASPIFGVETDVFDIW

SEQ ID NO: 52688 - protein, 16 aa, Homo sapiens
CARDLGNEVVAAIDYW

SEQ ID NO: 52689 - protein, 21 aa, Homo sapiens
CARHAPPDFWVSYYYYGMDVW

SEQ ID NO: 52690 - protein, 17 aa, Homo sapiens
CARDLPVLESTMGDDYW

SEQ ID NO: 52691 - protein, 17 aa, Homo sapiens
CARTATSVTTFMWFDPW

SEQ ID NO: 52692 - protein, 26 aa, Homo sapiens
CATASPFVLRTEQWLVLPQGGWFDPW

SEQ ID NO: 52693 - protein, 23 aa, Homo sapiens
CAREATTFSADWFQDSDTYFDYW

SEQ ID NO: 52694 - protein, 22 aa, Homo sapiens
CATSYSSVWGGGPSEAAGFDYW

SEQ ID NO: 52695 - protein, 19 aa, Homo sapiens
CATIAAAAHSDYYYYMDVW

SEQ ID NO: 52696 - protein, 18 aa, Homo sapiens
CARDSYGSNPQDWYFDLW

SEQ ID NO: 52697 - protein, 12 aa, Homo sapiens
CQSYDNNNFWVF

SEQ ID NO: 52698 - protein, 32 aa, Homo sapiens
CARETTYYDFWSGYLAPSRSKKLAPDDAFDIW

SEQ ID NO: 52699 - protein, 20 aa, Homo sapiens
CAREARGYYYDSSGYSIDYW

SEQ ID NO: 52700 - protein, 18 aa, Homo sapiens
CAKDQVDSSSWYGYFDYW

SEQ ID NO: 52701 - protein, 20 aa, Homo sapiens
CAREGFYYDSSGYYYEFDPW

SEQ ID NO: 52702 - protein, 12 aa, Homo sapiens
CARGIFPPLDYW

SEQ ID NO: 52703 - protein, 15 aa, Homo sapiens
CARHCSSTSCPFDYW

SEQ ID NO: 52704 - protein, 33 aa, Homo sapiens
CARDSQGDYDFWSGFPNLLGSESYYYYYYMDVW

SEQ ID NO: 52705 - protein, 19 aa, Homo sapiens
CWADYYDSSGYSQNYFDYW

SEQ ID NO: 52706 - protein, 16 aa, Homo sapiens
CARGFGTGTYDAFDIW

SEQ ID NO: 52707 - protein, 22 aa, Homo sapiens
CAKVGMSYCSGGSCYSGYFDYW

SEQ ID NO: 52708 - protein, 24 aa, Homo sapiens
CARSWSRVRKLLRRPEVSYYMDLW

SEQ ID NO: 52709 - protein, 19 aa, Homo sapiens
CARDLWQQLVSGAGYFQHW

SEQ ID NO: 52710 - protein, 20 aa, Homo sapiens
CTRDKGYCTDGSCRNLFDPW

SEQ ID NO: 52711 - protein, 22 aa, Homo sapiens
CAKAFMITFGGVIVKTAAFDYW

SEQ ID NO: 52712 - protein, 24 aa, Homo sapiens
CARERVSVTMVQGDYYYYYGMDVW

SEQ ID NO: 52713 - protein, 17 aa, Homo sapiens
CTADFTSTWYVSLWDYW

SEQ ID NO: 52714 - protein, 26 aa, Homo sapiens
CAKEGRTSDTYYYDNSAYYPLYFDYW

SEQ ID NO: 52715 - protein, 16 aa, Homo sapiens
CAKDRYLGSFYDFDSW

SEQ ID NO: 52716 - protein, 26 aa, Homo sapiens
CARSLLWFRELLPQFNYYYYYYMDVW

SEQ ID NO: 52717 - protein, 14 aa, Homo sapiens
CATFADYYDSSDYW

SEQ ID NO: 52718 - protein, 17 aa, Homo sapiens
CARGFCSGGSCSWVDYW

SEQ ID NO: 52719 - protein, 18 aa, Homo sapiens
CARLRDYYGSGSDYFDYW

SEQ ID NO: 52720 - protein, 20 aa, Homo sapiens
CARSFWSGSQHYYYYYMDVW

SEQ ID NO: 52721 - protein, 20 aa, Homo sapiens
CASLFDPLIAAAGLDAFDIW

SEQ ID NO: 52722 - protein, 20 aa, Homo sapiens
CAKAQLTTAPYYYYYYMDVW

SEQ ID NO: 52723 - protein, 20 aa, Homo sapiens
CARQGEFCTGGVCLSNFDNW

SEQ ID NO: 52724 - protein, 20 aa, Homo sapiens
CARISSSWYPHYYYYGMDVW

SEQ ID NO: 52725 - protein, 15 aa, Homo sapiens
CARGSHHYYRWFDPW

SEQ ID NO: 52726 - protein, 12 aa, Homo sapiens
CASSLLEWIDYW

SEQ ID NO: 52727 - protein, 25 aa, Homo sapiens
CARVGLLGGVSLGPGVGIYHNFDYW

SEQ ID NO: 52728 - protein, 18 aa, Homo sapiens
CARDGSLSTVTKWRFDPW

SEQ ID NO: 52729 - protein, 20 aa, Homo sapiens
CAKFSGYDFWSGYSTNIDYW

SEQ ID NO: 52730 - protein, 19 aa, Homo sapiens
CARDSSWSDWGSSWYFDLW

SEQ ID NO: 52731 - protein, 23 aa, Homo sapiens
CARIQRINDYIWGSYHYDAFDIW

SEQ ID NO: 52732 - protein, 19 aa, Homo sapiens
CARDPPVVQGVSTLIFDYW

SEQ ID NO: 52733 - protein, 17 aa, Homo sapiens
CAKASGGSGYYYRFDYW

SEQ ID NO: 52734 - protein, 22 aa, Homo sapiens
CARGSGSGWILGATLLNAFDIW

SEQ ID NO: 52735 - protein, 14 aa, Homo sapiens
CARLIAGSGQLDYW

SEQ ID NO: 52736 - protein, 30 aa, Homo sapiens
CAKDRKNYDFWSGYLRNSDTYYYYYGMDVW

SEQ ID NO: 52737 - protein, 20 aa, Homo sapiens
CARWDGLYSSGWYPVAFDIW

SEQ ID NO: 52738 - protein, 15 aa, Homo sapiens
CARAVTISPFIDDYW

SEQ ID NO: 52739 - protein, 14 aa, Homo sapiens
CVHLDNWNGYFAHW

SEQ ID NO: 52740 - protein, 22 aa, Homo sapiens
CASAWFRESRPGVYYYYGMDVW

SEQ ID NO: 52741 - protein, 33 aa, Homo sapiens
CARDRHSVYYDILTGYYYDEGKSQRDDWYFDLW

SEQ ID NO: 52742 - protein, 16 aa, Homo sapiens
CARDGATVTTPHFDYW

SEQ ID NO: 52743 - protein, 16 aa, Homo sapiens
CASPRGYSGYDAFDYW

SEQ ID NO: 52744 - protein, 19 aa, Homo sapiens
CARVPYDSSGYSDWYFDLW

SEQ ID NO: 52745 - protein, 16 aa, Homo sapiens
CARSSAGGYWGPFDYW

SEQ ID NO: 52746 - protein, 13 aa, Homo sapiens
CQHYDNVPPECSF

SEQ ID NO: 52747 - protein, 21 aa, Homo sapiens
CARDPVYCSGGGCFGGWFDPW

SEQ ID NO: 52748 - protein, 22 aa, Homo sapiens
CAKLQVLPYDFWSGDSWGFDYW

SEQ ID NO: 52749 - protein, 20 aa, Homo sapiens
CARDGVDWGSYRYFPNFDYW

SEQ ID NO: 52750 - protein, 18 aa, Homo sapiens
CAREGPTMIVAPLYLGYW

SEQ ID NO: 52751 - protein, 24 aa, Homo sapiens
CARESITMVQGVIILGDYYYMDVW

SEQ ID NO: 52752 - protein, 22 aa, Homo sapiens
CTTEPARGYSGYDYYYYYMDVW

SEQ ID NO: 52753 - protein, 15 aa, Homo sapiens
CARGFVAYRTGSDYW

SEQ ID NO: 52754 - protein, 20 aa, Homo sapiens
CARETLYYDFWSGYYGLDYW

SEQ ID NO: 52755 - protein, 31 aa, Homo sapiens
CARGVLDFEPAKNPYDILTGYYAEYNWFDPW

SEQ ID NO: 52756 - protein, 28 aa, Homo sapiens
CAKDLNIVATITYVDGDYSGYYYGMDVW

SEQ ID NO: 52757 - protein, 18 aa, Homo sapiens
CARDGDILTGRSVAFDPW

SEQ ID NO: 52758 - protein, 19 aa, Homo sapiens
CATYPRNGGSYEGYYFDYW

SEQ ID NO: 52759 - protein, 16 aa, Homo sapiens
CAHRGVTTVTTGFDYW

SEQ ID NO: 52760 - protein, 24 aa, Homo sapiens
CARDPIRFLEWLSTHYYYYGMDVW

SEQ ID NO: 52761 - protein, 23 aa, Homo sapiens
CASIKIFRITFGGVIVEDYFDYW

SEQ ID NO: 52762 - protein, 17 aa, Homo sapiens
CARDGGSGGWNSPFDYW

SEQ ID NO: 52763 - protein, 20 aa, Homo sapiens
CARKAYYYDSSGPQYAFDIW

SEQ ID NO: 52764 - protein, 14 aa, Homo sapiens
CARAYFDSGAFDSW

SEQ ID NO: 52765 - protein, 15 aa, Homo sapiens
CARIHSTNWGVFDYW

SEQ ID NO: 52766 - protein, 17 aa, Homo sapiens
CARQSGIVTTTDILDYW

SEQ ID NO: 52767 - protein, 21 aa, Homo sapiens
CATELLELGSGSYYSDAFDIW

SEQ ID NO: 52768 - protein, 17 aa, Homo sapiens
CAREEYYDFWRKHFDYW

SEQ ID NO: 52769 - protein, 15 aa, Homo sapiens
CVSGGLYGDYNFDYW

SEQ ID NO: 52770 - protein, 19 aa, Homo sapiens
CARALSSSWPLRPYYFDYW

SEQ ID NO: 52771 - protein, 14 aa, Homo sapiens
CSSYSTSSTLDVLF

SEQ ID NO: 52772 - protein, 17 aa, Homo sapiens
CARRLNNSPAENWFDPW

SEQ ID NO: 52773 - protein, 19 aa, Homo sapiens
CARTGRTSGYYSVYYFDYW

SEQ ID NO: 52774 - protein, 22 aa, Homo sapiens
CARDFTVTVGATTDYYYGMDVW

SEQ ID NO: 52775 - protein, 18 aa, Homo sapiens
CARILTAGGDYRGWFDPW

SEQ ID NO: 52776 - protein, 21 aa, Homo sapiens
CAKEWGSSSWYDLYYYGMDVW

SEQ ID NO: 52777 - protein, 23 aa, Homo sapiens
CARDPTVTTRDLSYYYYYGMDVW

SEQ ID NO: 52778 - protein, 19 aa, Homo sapiens
CAHSYDMGDYSLIGAFDYW

SEQ ID NO: 52779 - protein, 20 aa, Homo sapiens
CAREPMYSSSWNTGEYFQHW

SEQ ID NO: 52780 - protein, 19 aa, Homo sapiens
CAKDLASGTVTPHAAFDIW

SEQ ID NO: 52781 - protein, 21 aa, Homo sapiens
CAREGPAYDSSGWILGWFDPW

SEQ ID NO: 52782 - protein, 15 aa, Homo sapiens
CARDPNRSSWSFDLW

SEQ ID NO: 52783 - protein, 12 aa, Homo sapiens
CARSNDRVYDYW

SEQ ID NO: 52784 - protein, 20 aa, Homo sapiens
CAREVVVPAAIISPYYFDYW

SEQ ID NO: 52785 - protein, 23 aa, Homo sapiens
CARFRLPYYGSGSYTGGNWFDPW

SEQ ID NO: 52786 - protein, 21 aa, Homo sapiens
CARRAFGGVIVRPDGGWFDPW

SEQ ID NO: 52787 - protein, 17 aa, Homo sapiens
CARISSFSSSWPTFDYW

SEQ ID NO: 52788 - protein, 25 aa, Homo sapiens
CARQNDGEPVITIFGVVIIRWFDPW

SEQ ID NO: 52789 - protein, 19 aa, Homo sapiens
CARTVSDLTTVTRDYFDYW

SEQ ID NO: 52790 - protein, 20 aa, Homo sapiens
CAKDLGYGSGSFYYYGMDVW

SEQ ID NO: 52791 - protein, 21 aa, Homo sapiens
CARDPGRDGIQLWLSPSFDYW

SEQ ID NO: 52792 - protein, 18 aa, Homo sapiens
CARDVGGKYSGSFYIDYW

SEQ ID NO: 52793 - protein, 20 aa, Homo sapiens
CARDQGIGWQQLLQNWFDPW

SEQ ID NO: 52794 - protein, 17 aa, Homo sapiens
CTRGPTGGLVGGYFQYW

SEQ ID NO: 52795 - protein, 20 aa, Homo sapiens
CARVHIDCTGGVCYSALDYW

SEQ ID NO: 52796 - protein, 19 aa, Homo sapiens
CARGGWLSTGTTMHYFDYW

SEQ ID NO: 52797 - protein, 22 aa, Homo sapiens
CARAPHYSDILTGYYVYYFDYW

SEQ ID NO: 52798 - protein, 23 aa, Homo sapiens
CARHAMDYDYIWGSYSVCWFDPW

SEQ ID NO: 52799 - protein, 20 aa, Homo sapiens
CARDGEYYDLLEYYYYMDVW

SEQ ID NO: 52800 - protein, 17 aa, Homo sapiens
CARDDEYSSSLYYFDYW

SEQ ID NO: 52801 - protein, 16 aa, Homo sapiens
CARARGTWGNGGFDIW

SEQ ID NO: 52802 - protein, 11 aa, Homo sapiens
CAVSYGDEDYW

SEQ ID NO: 52803 - protein, 23 aa, Homo sapiens
CASRRFDYDYIWGSYRLYYFDYW

SEQ ID NO: 52804 - protein, 16 aa, Homo sapiens
CARTIWSGYYIWFDPW

SEQ ID NO: 52805 - protein, 26 aa, Homo sapiens
CARSIHTPAPYYDFWSGYYPAAFDIW

SEQ ID NO: 52806 - protein, 19 aa, Homo sapiens
CATIDFWSGYYDYYYMDVW

SEQ ID NO: 52807 - protein, 17 aa, Homo sapiens
CATEHLDRWNPGTFDYW

SEQ ID NO: 52808 - protein, 19 aa, Homo sapiens
CASLGWDDYGGNSPPFDYW

SEQ ID NO: 52809 - protein, 17 aa, Homo sapiens
CARDPPDGEYYYGMDVW

SEQ ID NO: 52810 - protein, 17 aa, Homo sapiens
CIRIVATIGLDIWFDPW

SEQ ID NO: 52811 - protein, 16 aa, Homo sapiens
CAKANSGSYFSFFDYW

SEQ ID NO: 52812 - protein, 16 aa, Homo sapiens
CSTTPGRELRDGFDIW

SEQ ID NO: 52813 - protein, 28 aa, Homo sapiens
CARDGDLYSSSSGEQWLVPSVGYYFDYW

SEQ ID NO: 52814 - protein, 19 aa, Homo sapiens
CARELVVITNYYYYYMDVW

SEQ ID NO: 52815 - protein, 24 aa, Homo sapiens
CARDLLPYYDFWSGYYSADGMDVW

SEQ ID NO: 52816 - protein, 23 aa, Homo sapiens
CARTNSLITYDSSGYYYGALDYW

SEQ ID NO: 52817 - protein, 20 aa, Homo sapiens
CARATPIVVVPAAENWFDPW

SEQ ID NO: 52818 - protein, 19 aa, Homo sapiens
CVRDKHYSSWYDYWYFDLW

SEQ ID NO: 52819 - protein, 21 aa, Homo sapiens
CARHVFWLGDYGDYARIFDYW

SEQ ID NO: 52820 - protein, 20 aa, Homo sapiens
CARHVAYCSGGDCYFAFDIW

SEQ ID NO: 52821 - protein, 24 aa, Homo sapiens
CARASREDDYIWGSYRYLYYFDYW

SEQ ID NO: 52822 - protein, 19 aa, Homo sapiens
CARVPVGTVGESDDAFDIW

SEQ ID NO: 52823 - protein, 21 aa, Homo sapiens
CARDVPITMIVAGDHDAFDIW

SEQ ID NO: 52824 - protein, 23 aa, Homo sapiens
CARTLWRVVPAAIGYYYYGMDVW

SEQ ID NO: 52825 - protein, 19 aa, Homo sapiens
CVRDSPSYYGSGSYLFDYW

SEQ ID NO: 52826 - protein, 17 aa, Homo sapiens
CARRVGWGPRGNWFDPW

SEQ ID NO: 52827 - protein, 15 aa, Homo sapiens
CANYDYWSGYRFDPW

SEQ ID NO: 52828 - protein, 19 aa, Homo sapiens
CARWGDSSGYYYAYYFDYW

SEQ ID NO: 52829 - protein, 17 aa, Homo sapiens
CASEDIVVTSEYAFDIW

SEQ ID NO: 52830 - protein, 26 aa, Homo sapiens
CARLAPYSSGWYGSGGLYYYYGMDVW

SEQ ID NO: 52831 - protein, 20 aa, Homo sapiens
CARHTTDCSGGSCYSSFDYW

SEQ ID NO: 52832 - protein, 19 aa, Homo sapiens
CAREGIAARPRGLLFLDYW

SEQ ID NO: 52833 - protein, 29 aa, Homo sapiens
CARDSEYYDILTGYYSRPFYYYYYYMDVW

SEQ ID NO: 52834 - protein, 26 aa, Homo sapiens
CARAPSYYDFWSGYQMTYYYYGMDVW

SEQ ID NO: 52835 - protein, 20 aa, Homo sapiens
CARDLVVPAAIIPHDAFDIW

SEQ ID NO: 52836 - protein, 20 aa, Homo sapiens
CARGGWDSSGYKQSGWFDPW

SEQ ID NO: 52837 - protein, 16 aa, Homo sapiens
CARRVSSPFFNWFDPW

SEQ ID NO: 52838 - protein, 17 aa, Homo sapiens
CAKDLLSGDYGNGFDYW

SEQ ID NO: 52839 - protein, 14 aa, Homo sapiens
CAKPAAAGTASDYW

SEQ ID NO: 52840 - protein, 16 aa, Homo sapiens
CARGAGYGDYSKFDFW

SEQ ID NO: 52841 - protein, 22 aa, Homo sapiens
CARDGQDEYYDFWSDYYHFDYW

SEQ ID NO: 52842 - protein, 17 aa, Homo sapiens
CAVFSDLEWLLYWFDPW

SEQ ID NO: 52843 - protein, 24 aa, Homo sapiens
CARPPRGYYDSSGYYHRSVYFQHW

SEQ ID NO: 52844 - protein, 21 aa, Homo sapiens
CARDLWRLQYGYYYYYGMDVW

SEQ ID NO: 52845 - protein, 21 aa, Homo sapiens
CARWGLSLVVYAENVNWFDPW

SEQ ID NO: 52846 - protein, 15 aa, Homo sapiens
CAKFGEEGANSFDYW

SEQ ID NO: 52847 - protein, 15 aa, Homo sapiens
CAREAPGEYAQFDYW

SEQ ID NO: 52848 - protein, 26 aa, Homo sapiens
CAREVPPREEQWLYVHYYYYYYMDVW

SEQ ID NO: 52849 - protein, 21 aa, Homo sapiens
CAKMSDAGIAVAGSDRLPDYW

SEQ ID NO: 52850 - protein, 17 aa, Homo sapiens
CAKQSGEAYYSYGMDVW

SEQ ID NO: 52851 - protein, 16 aa, Homo sapiens
CARDRLLQPYNWFDPW

SEQ ID NO: 52852 - protein, 17 aa, Homo sapiens
CATVKGLTTVTTHFDYW

SEQ ID NO: 52853 - protein, 19 aa, Homo sapiens
CARDPGHYYDSSGSGMDYW

SEQ ID NO: 52854 - protein, 19 aa, Homo sapiens
CARQGEGDILTANDAFDIW

SEQ ID NO: 52855 - protein, 19 aa, Homo sapiens
CARAVPSSSGWYVDAFDIW

SEQ ID NO: 52856 - protein, 25 aa, Homo sapiens
CARDFWSDFPALTLEYYYYYYMDVW

SEQ ID NO: 52857 - protein, 18 aa, Homo sapiens
CARVIITMVQGARRFDPW

SEQ ID NO: 52858 - protein, 18 aa, Homo sapiens
CARDPRTFGGVVPWFDPW

SEQ ID NO: 52859 - protein, 21 aa, Homo sapiens
CAKVHRDTIFGVVIISAFDIW

SEQ ID NO: 52860 - protein, 13 aa, Homo sapiens
CARGVGRTYFQHW

SEQ ID NO: 52861 - protein, 18 aa, Homo sapiens
CARKRGSDSYSIDAFDIW

SEQ ID NO: 52862 - protein, 17 aa, Homo sapiens
CARDLRSHSSSTYFDYW

SEQ ID NO: 52863 - protein, 29 aa, Homo sapiens
CAKSSMADMSKIRWDQVWNIYYYYYMDVW

SEQ ID NO: 52864 - protein, 11 aa, Homo sapiens
CQQCSAWPWAF

SEQ ID NO: 52865 - protein, 18 aa, Homo sapiens
CARGGLLGSGRGDWFDPW

SEQ ID NO: 52866 - protein, 18 aa, Homo sapiens
CARLEDIFGSGSYYHDYW

SEQ ID NO: 52867 - protein, 21 aa, Homo sapiens
CARVALNEYGDEDHKQGFDYW

SEQ ID NO: 52868 - protein, 12 aa, Homo sapiens
CTRRGERDFDSW

SEQ ID NO: 52869 - protein, 19 aa, Homo sapiens
CAREATVTTPHTDDFFDTW

SEQ ID NO: 52870 - protein, 16 aa, Homo sapiens
CAGVVVVAAQGAFDIW

SEQ ID NO: 52871 - protein, 22 aa, Homo sapiens
CATVHYRFNEWVRGVSYYFDYW

SEQ ID NO: 52872 - protein, 27 aa, Homo sapiens
CAREDYYYDSSGYYSRGRDYYYGMDVW

SEQ ID NO: 52873 - protein, 20 aa, Homo sapiens
CARSVYCLRGTCYVGYMDVW

SEQ ID NO: 52874 - protein, 17 aa, Homo sapiens
CARGAGSGGATGCFDYW

SEQ ID NO: 52875 - protein, 14 aa, Homo sapiens
CSRDRLSGYSPDYW

SEQ ID NO: 52876 - protein, 16 aa, Homo sapiens
CARDRHPLYNYYMDVW

SEQ ID NO: 52877 - protein, 22 aa, Homo sapiens
CARDTDIVVVPAAMDVHYMDVW

SEQ ID NO: 52878 - protein, 18 aa, Homo sapiens
CARDREIAVAGHDAFDIW

SEQ ID NO: 52879 - protein, 21 aa, Homo sapiens
CARLMSGPEDYDFWSGYFDYW

SEQ ID NO: 52880 - protein, 22 aa, Homo sapiens
CARVQPGPYDFWSGYSWGFDYW

SEQ ID NO: 52881 - protein, 21 aa, Homo sapiens
CARTSETGSFLEWLLFPFDYW

SEQ ID NO: 52882 - protein, 15 aa, Homo sapiens
CAKALYGGSDHFDYW

SEQ ID NO: 52883 - protein, 14 aa, Homo sapiens
CTRVPVTPRIFDSW

SEQ ID NO: 52884 - protein, 17 aa, Homo sapiens
CAKVYGDEYYYYGMDVW

SEQ ID NO: 52885 - protein, 18 aa, Homo sapiens
CARYDYGDYEVYYGMDVW

SEQ ID NO: 52886 - protein, 15 aa, Homo sapiens
CAKQWGGTYSLFDYW

SEQ ID NO: 52887 - protein, 22 aa, Homo sapiens
CVHSPCNYDVWSAYYRVHFDSW

SEQ ID NO: 52888 - protein, 20 aa, Homo sapiens
CARLSDSGYFDWSYNWFDPW

SEQ ID NO: 52889 - protein, 20 aa, Homo sapiens
CARTCGGDCYSGIYNWFDPW

SEQ ID NO: 52890 - protein, 18 aa, Homo sapiens
CATAPVLTTVTKSWFDPW

SEQ ID NO: 52891 - protein, 23 aa, Homo sapiens
CAKDGGVYDYIWGSYQINWFDPW

SEQ ID NO: 52892 - protein, 25 aa, Homo sapiens
CARATTYYYDSSGYLRGYYYGMDVW

SEQ ID NO: 52893 - protein, 18 aa, Homo sapiens
CARVFQLVRSQTRWFDPW

SEQ ID NO: 52894 - protein, 22 aa, Homo sapiens
CARDIKPTRGSIFQYYYGMDVW

SEQ ID NO: 52895 - protein, 20 aa, Homo sapiens
CARQLEQQLGRYYYYYMDVW

SEQ ID NO: 52896 - protein, 21 aa, Homo sapiens
CARVAGSGYDWDYYYYGMDVW

SEQ ID NO: 52897 - protein, 14 aa, Homo sapiens
CARKGFLSGYSDFW

SEQ ID NO: 52898 - protein, 17 aa, Homo sapiens
CARVWFRESDEDAFDIW

SEQ ID NO: 52899 - protein, 23 aa, Homo sapiens
CAKMAVYDFWSGYYDGNDAFDIW

SEQ ID NO: 52900 - protein, 19 aa, Homo sapiens
CARRLIDSSGWYGWWFDPW

SEQ ID NO: 52901 - protein, 13 aa, Homo sapiens
CAREVEGDGMDVW

SEQ ID NO: 52902 - protein, 30 aa, Homo sapiens
CARQTKSYYDFWSYIHPEPQNDEVNWFDPW

SEQ ID NO: 52903 - protein, 33 aa, Homo sapiens
CARDWPRGLGAYYDFWSGYNAPPTGGRNWFDPW

SEQ ID NO: 52904 - protein, 13 aa, Homo sapiens
CATWDSPGAFDIW

SEQ ID NO: 52905 - protein, 17 aa, Homo sapiens
CARDVWSGWQTAHFDYW

SEQ ID NO: 52906 - protein, 18 aa, Homo sapiens
CARAGDSSGFDAGYFDLW

SEQ ID NO: 52907 - protein, 20 aa, Homo sapiens
CAREGCSGGSCYSETYFDYW

SEQ ID NO: 52908 - protein, 20 aa, Homo sapiens
CARDPPREDGDYVDWYFDLW

SEQ ID NO: 52909 - protein, 19 aa, Homo sapiens
CARDALYHYGSGKYYMDVW

SEQ ID NO: 52910 - protein, 21 aa, Homo sapiens
CARTYSSSWWPRNYYYGMDVW

SEQ ID NO: 52911 - protein, 21 aa, Homo sapiens
CARALTAPAAIWYYYYGMDVW

SEQ ID NO: 52912 - protein, 19 aa, Homo sapiens
CAKQLAVAGTYYYYYMDVW

SEQ ID NO: 52913 - protein, 14 aa, Homo sapiens
CGRRGAAVGYIDLW

SEQ ID NO: 52914 - protein, 18 aa, Homo sapiens
CATLYYDILTGPSYMDVW

SEQ ID NO: 52915 - protein, 16 aa, Homo sapiens
CARAPGGSYSYYFDYW

SEQ ID NO: 52916 - protein, 15 aa, Homo sapiens
CASDSRRINSLFDYW

SEQ ID NO: 52917 - protein, 16 aa, Homo sapiens
CAREWGGADWRRFDSW

SEQ ID NO: 52918 - protein, 17 aa, Homo sapiens
CAKKWYSSRGRGYFEYW

SEQ ID NO: 52919 - protein, 15 aa, Homo sapiens
CARGGQLVPYYMDVW

SEQ ID NO: 52920 - protein, 22 aa, Homo sapiens
CARNSWSRGEWGDYYYYGMDVW

SEQ ID NO: 52921 - protein, 26 aa, Homo sapiens
CARDSGSYSGGASAPDPDQQGTFDPW

SEQ ID NO: 52922 - protein, 18 aa, Homo sapiens
CAKTGVDYSNGVSGFDYW

SEQ ID NO: 52923 - protein, 22 aa, Homo sapiens
CARGLGVRWYSSSPGDNWFDPW

SEQ ID NO: 52924 - protein, 19 aa, Homo sapiens
CARPTLDYGDYVEDAFDIW

SEQ ID NO: 52925 - protein, 15 aa, Homo sapiens
CARGRHSYGWGVDYW

SEQ ID NO: 52926 - protein, 14 aa, Homo sapiens
CARHVTISPDFDYW

SEQ ID NO: 52927 - protein, 15 aa, Homo sapiens
CATLPGREDGLPDYW

SEQ ID NO: 52928 - protein, 19 aa, Homo sapiens
CARQTSSGWIQGSNWFDPW

SEQ ID NO: 52929 - protein, 15 aa, Homo sapiens
CARAPIAAAGLYDYW

SEQ ID NO: 52930 - protein, 18 aa, Homo sapiens
CARDPPRLVVVPAAPDYW

SEQ ID NO: 52931 - protein, 17 aa, Homo sapiens
CATAYYYGSGSYAFAIW

SEQ ID NO: 52932 - protein, 19 aa, Homo sapiens
CARDRSSSSSFFDRYFDYW

SEQ ID NO: 52933 - protein, 33 aa, Homo sapiens
CARDSRAAVTIFGVDVVIAIPGSLWYYYYMDVW

SEQ ID NO: 52934 - protein, 20 aa, Homo sapiens
CARADDWSGYYTNYYGMDVW

SEQ ID NO: 52935 - protein, 18 aa, Homo sapiens
CAKGYYDILTGYYTPDYW

SEQ ID NO: 52936 - protein, 17 aa, Homo sapiens
CAKDSDGDYDWMAFDVW

SEQ ID NO: 52937 - protein, 19 aa, Homo sapiens
CARIRGTPAYYYYYGMDVW

SEQ ID NO: 52938 - protein, 20 aa, Homo sapiens
CARVSPLGYGDTGYNHLDYW

SEQ ID NO: 52939 - protein, 19 aa, Homo sapiens
CARHYGSVQSYYYYGMDVW

SEQ ID NO: 52940 - protein, 25 aa, Homo sapiens
CARDQPPLRFLEWLSVTPSYYMDVW

SEQ ID NO: 52941 - protein, 24 aa, Homo sapiens
CARHGDDFWSGRPNGIYYYYMDVW

SEQ ID NO: 52942 - protein, 17 aa, Homo sapiens
CANIWYYGSGYDAFDIW

SEQ ID NO: 52943 - protein, 15 aa, Homo sapiens
CARSPLSDFRAFDIW

SEQ ID NO: 52944 - protein, 19 aa, Homo sapiens
CATAVSIAAAGYYYYMDVW

SEQ ID NO: 52945 - protein, 14 aa, Homo sapiens
CQSYDGSLDLAYVF

SEQ ID NO: 52946 - protein, 22 aa, Homo sapiens
CARDGQNYYDSSGYYASAFDIW

SEQ ID NO: 52947 - protein, 16 aa, Homo sapiens
CTTVFHYDFWSGYDYW

SEQ ID NO: 52948 - protein, 16 aa, Homo sapiens
CAPWGGDYGDQPFDYW

SEQ ID NO: 52949 - protein, 15 aa, Homo sapiens
CARDVTTRYFAMDVW

SEQ ID NO: 52950 - protein, 7 aa, Homo sapiens [sequence omitted]

SEQ ID NO: 52951 - protein, 12 aa, Homo sapiens
CAGGALRWLDYW

SEQ ID NO: 52952 - protein, 21 aa, Homo sapiens
CARVALGYCSSTSCQRAFDYW

SEQ ID NO: 52953 - protein, 22 aa, Homo sapiens
CAKEDCSSPTCRLVALELFDYW

SEQ ID NO: 52954 - protein, 10 aa, Homo sapiens
CSTGRENDYW

SEQ ID NO: 52955 - protein, 15 aa, Homo sapiens
CARSWSARVGYFDYW

SEQ ID NO: 52956 - protein, 14 aa, Homo sapiens
CATQGGSSWYFDYW

SEQ ID NO: 52957 - protein, 20 aa, Homo sapiens
CAREGLAYDILTGPPPFDYW

SEQ ID NO: 52958 - protein, 19 aa, Homo sapiens
CARVTVTMIPAFRAAFDIW

SEQ ID NO: 52959 - protein, 31 aa, Homo sapiens
CARIGVPYYDFWSGYVNGIGGYYFYYGMDVW

SEQ ID NO: 52960 - protein, 19 aa, Homo sapiens
CARVVGDGYNRDPDAFDIW

SEQ ID NO: 52961 - protein, 22 aa, Homo sapiens
CARHVGYSYGFVGYYYYGMDVW

SEQ ID NO: 52962 - protein, 19 aa, Homo sapiens
CARGRDSGDYGIIHPIDYW

SEQ ID NO: 52963 - protein, 23 aa, Homo sapiens
CAREMRVFGVVIDAYYYYYMDVW

SEQ ID NO: 52964 - protein, 17 aa, Homo sapiens
CARDPPSAVAGTRDDYW

SEQ ID NO: 52965 - protein, 14 aa, Homo sapiens
CAKVGSSGWYGDYW

SEQ ID NO: 52966 - protein, 20 aa, Homo sapiens
CASRGYCRSTICYGGEFDYW

SEQ ID NO: 52967 - protein, 17 aa, Homo sapiens
CARDGLIVVPAAYFDYW

SEQ ID NO: 52968 - protein, 19 aa, Homo sapiens
CAKTGYDLDYYYYYYMDVW

SEQ ID NO: 52969 - protein, 23 aa, Homo sapiens
CARDGGKATVTGFDYYYYGMDVW

SEQ ID NO: 52970 - protein, 19 aa, Homo sapiens
CAREGWWCTTCYYYGMDVW

SEQ ID NO: 52971 - protein, 19 aa, Homo sapiens
CARDNDFWSGYYPEPFDYW

SEQ ID NO: 52972 - protein, 22 aa, Homo sapiens
CSRGTPGYSSGWFRHSYYFDYW

SEQ ID NO: 52973 - protein, 24 aa, Homo sapiens
CARRIGYCTGGVCYKLDYYYMDVW

SEQ ID NO: 52974 - protein, 19 aa, Homo sapiens
CASDYDFWSGYYSDAFDIW

SEQ ID NO: 52975 - protein, 17 aa, Homo sapiens
CARESNVYTSRSANDYW

SEQ ID NO: 52976 - protein, 19 aa, Homo sapiens
CAREKRRDYDFWSGYFDYW

SEQ ID NO: 52977 - protein, 18 aa, Homo sapiens
CARGGFSSGHRYNWFDPW

SEQ ID NO: 52978 - protein, 23 aa, Homo sapiens
CARDHTLGYCSGGSCYRRAFDIW

SEQ ID NO: 52979 - protein, 19 aa, Homo sapiens
CARSGWKTHYYYYYGMDVW

SEQ ID NO: 52980 - protein, 23 aa, Homo sapiens
CARRGGVEITIFGVVPSLAFDIW

SEQ ID NO: 52981 - protein, 24 aa, Homo sapiens
CAHGFSYYDYIWGGSPASVAFDIW

SEQ ID NO: 52982 - protein, 19 aa, Homo sapiens
CARDRLQNFDWLLQGIDYW

SEQ ID NO: 52983 - protein, 28 aa, Homo sapiens
CARHLPVRDGDRTTGTTSYYYYYGMDVW

SEQ ID NO: 52984 - protein, 23 aa, Homo sapiens
CASASSDYDYIWGSYPSNAFDIW

SEQ ID NO: 52985 - protein, 15 aa, Homo sapiens
CARSTYMIAVAGDYW

SEQ ID NO: 52986 - protein, 19 aa, Homo sapiens
CASNRDYYGSGSYSPFDYW

SEQ ID NO: 52987 - protein, 21 aa, Homo sapiens
CARDQDSPVGLEWSYYYMDVW

SEQ ID NO: 52988 - protein, 16 aa, Homo sapiens
CARIMGDYTTYWFDPW

SEQ ID NO: 52989 - protein, 22 aa, Homo sapiens
CTTDGVSNITPTIRAPWYFDVW

SEQ ID NO: 52990 - protein, 16 aa, Homo sapiens
CAKDGGFWGFNWFDPW

SEQ ID NO: 52991 - protein, 19 aa, Homo sapiens
CARTYYDILSGALDAFDIW

SEQ ID NO: 52992 - protein, 21 aa, Homo sapiens
CARATYYYDSSSPAQHAFDIW

SEQ ID NO: 52993 - protein, 22 aa, Homo sapiens
CARVPMVQGVIIDYYYYGMDVW

SEQ ID NO: 52994 - protein, 16 aa, Homo sapiens
CAHSGDFWSGYYPDYW

SEQ ID NO: 52995 - protein, 21 aa, Homo sapiens
CARVYDYDFWSGYYLGWFDPW

SEQ ID NO: 52996 - protein, 22 aa, Homo sapiens
CARVGSGSYYGGLYYYYYMDVW

SEQ ID NO: 52997 - protein, 23 aa, Homo sapiens
CARDRYSGYSWGGYYYYYFMDVW

SEQ ID NO: 52998 - protein, 13 aa, Homo sapiens
CATGTWVRLADYW

SEQ ID NO: 52999 - protein, 18 aa, Homo sapiens
CASLDGDGWSSRYYFDYW

SEQ ID NO: 53000 - protein, 18 aa, Homo sapiens
CAHRGITIFGVAMAYDYW

SEQ ID NO: 53001 - protein, 21 aa, Homo sapiens
CARGPANDFWSGSLEYYFDYW

SEQ ID NO: 53002 - protein, 18 aa, Homo sapiens
CARDESGSIAVAGDFDYW

SEQ ID NO: 53003 - protein, 19 aa, Homo sapiens
CAQGLGWNGYYVSRDFDCW

SEQ ID NO: 53004 - protein, 19 aa, Homo sapiens
CARRITIFGVVTNNWFDPW

SEQ ID NO: 53005 - protein, 20 aa, Homo sapiens
CASLPTSYSSGWRDDAFDIW

SEQ ID NO: 53006 - protein, 16 aa, Homo sapiens
CAKDSQPGGPEYFQHW

SEQ ID NO: 53007 - protein, 21 aa, Homo sapiens
CAREPHYYDSSGYSWNWFDPW

SEQ ID NO: 53008 - protein, 17 aa, Homo sapiens
CARENQDDSAHNWFDPW

SEQ ID NO: 53009 - protein, 18 aa, Homo sapiens
CSGRDAYNHYYYYYMDVW

SEQ ID NO: 53010 - protein, 19 aa, Homo sapiens
CARLIHLGELSLSGWFDPW

SEQ ID NO: 53011 - protein, 14 aa, Homo sapiens
CAKVGMQEYPHDYW

SEQ ID NO: 53012 - protein, 23 aa, Homo sapiens
CATNVRFLEWSSPYYYYYYMDVW

SEQ ID NO: 53013 - protein, 17 aa, Homo sapiens
CTSHDYGDYYYYGMDVW

SEQ ID NO: 53014 - protein, 24 aa, Homo sapiens
CAANVAPSEVLRFLEWSTRGNDYW

SEQ ID NO: 53015 - protein, 19 aa, Homo sapiens
CARDRADPVFYYYYYMDVW

SEQ ID NO: 53016 - protein, 19 aa, Homo sapiens
CARTFYYDFWSGRIRFDPW

SEQ ID NO: 53017 - protein, 26 aa, Homo sapiens
CAKADGYSGYDLRFQVIYYYYGMDVW

SEQ ID NO: 53018 - protein, 17 aa, Homo sapiens
CARDTHYGSGSFWFDPW

SEQ ID NO: 53019 - protein, 16 aa, Homo sapiens
CATDIWGSYHDAFDIW

SEQ ID NO: 53020 - protein, 21 aa, Homo sapiens
CASAADSDYYDSSGHDAFDIW

SEQ ID NO: 53021 - protein, 21 aa, Homo sapiens
CARDLSICTGGVCYVIYFDYW

SEQ ID NO: 53022 - protein, 24 aa, Homo sapiens
CARGYCSGGSCYSFDDYYYYMDVW

SEQ ID NO: 53023 - protein, 24 aa, Homo sapiens
CARDEAGYSSSWYLGDGGNWFDPW

SEQ ID NO: 53024 - protein, 20 aa, Homo sapiens
CATGRVYCSGGSCLDWFDPW

SEQ ID NO: 53025 - protein, 26 aa, Homo sapiens
CARVSWGYCSSTSCHNRYYYYGMDVW

SEQ ID NO: 53026 - protein, 21 aa, Homo sapiens
CARSSRKIFGVVIIYPWFDPW

SEQ ID NO: 53027 - protein, 16 aa, Homo sapiens
CAREGITGTTTGFDYW

SEQ ID NO: 53028 - protein, 17 aa, Homo sapiens
CARIRGGDWNVWYFDLW

SEQ ID NO: 53029 - protein, 25 aa, Homo sapiens
CARILSSHDILTGYWDYYYYGMDVW

SEQ ID NO: 53030 - protein, 17 aa, Homo sapiens
CARNGIAAAGTIWFDPW

SEQ ID NO: 53031 - protein, 20 aa, Homo sapiens
CARGDRLSSGWYDHWYFDLW

SEQ ID NO: 53032 - protein, 23 aa, Homo sapiens
CARDRDCSGGSCYSYYYYGMDVW

SEQ ID NO: 53033 - protein, 18 aa, Homo sapiens
CARDYYPYQWLVPYMDVW

SEQ ID NO: 53034 - protein, 17 aa, Homo sapiens
CAKGYYDSSGYDPFDYW

SEQ ID NO: 53035 - protein, 18 aa, Homo sapiens
CARDREQSNNYYVAFDSW

SEQ ID NO: 53036 - protein, 20 aa, Homo sapiens
CAREKRVSLLGWYYYGMDVW

SEQ ID NO: 53037 - protein, 16 aa, Homo sapiens
CAKLPGRGYDDGTDYW

SEQ ID NO: 53038 - protein, 23 aa, Homo sapiens
CARHLDYYDSSGYYQDQYYFDYW

SEQ ID NO: 53039 - protein, 12 aa, Homo sapiens
CAGVPRTDPDYW

SEQ ID NO: 53040 - protein, 22 aa, Homo sapiens
CASSDGSRVGEITYYYYGMDVW

SEQ ID NO: 53041 - protein, 20 aa, Homo sapiens
CARIVADSGDYNVGGHFDYW

SEQ ID NO: 53042 - protein, 22 aa, Homo sapiens
CARVSRSPAAEYYYYYYGMDVW

SEQ ID NO: 53043 - protein, 20 aa, Homo sapiens
CARDSGSGYSSGWDDAFDIW

SEQ ID NO: 53044 - protein, 26 aa, Homo sapiens
CARAPADSMLDAFARTYYYYYYMDVW

SEQ ID NO: 53045 - protein, 17 aa, Homo sapiens
CARGYGDYDLSYYMDVW

SEQ ID NO: 53046 - protein, 21 aa, Homo sapiens
CARDSQLGDYGDSSPPWFDPW

SEQ ID NO: 53047 - protein, 16 aa, Homo sapiens
CAREAQGVIISAHDIW

SEQ ID NO: 53048 - protein, 19 aa, Homo sapiens
CARMVAYSYYYYYYYMDVW

SEQ ID NO: 53049 - protein, 22 aa, Homo sapiens
CARDPGLHLGELSLAGNAFDIW

SEQ ID NO: 53050 - protein, 20 aa, Homo sapiens
CARSDYGAPPGYYYYYMDVW

SEQ ID NO: 53051 - protein, 18 aa, Homo sapiens
CARERWQWLVGGGKSDYW

SEQ ID NO: 53052 - protein, 15 aa, Homo sapiens
CARESSAPGDYIDYW

SEQ ID NO: 53053 - protein, 19 aa, Homo sapiens
CARDLGIFGVVDPEYFQHW

SEQ ID NO: 53054 - protein, 21 aa, Homo sapiens
CARAPSLRLRSIFWFYYMDVW

SEQ ID NO: 53055 - protein, 17 aa, Homo sapiens
CAREGMGSGWSAHFDYW

SEQ ID NO: 53056 - protein, 22 aa, Homo sapiens
CATAECTSTSCDDQGHWYFDLW

SEQ ID NO: 53057 - protein, 16 aa, Homo sapiens
CARARESDWLLFLDYW

SEQ ID NO: 53058 - protein, 16 aa, Homo sapiens
CARGLYSASWYYFDPW

SEQ ID NO: 53059 - protein, 23 aa, Homo sapiens
CATTEKGYCSSTSCYVIDAFDIW

SEQ ID NO: 53060 - protein, 14 aa, Homo sapiens
CAHRLPFRGDFDYW

SEQ ID NO: 53061 - protein, 20 aa, Homo sapiens
CARVHPIAARSYYYYGMDVW

SEQ ID NO: 53062 - protein, 17 aa, Homo sapiens
CARGTVVAVSLDAFDFW

SEQ ID NO: 53063 - protein, 27 aa, Homo sapiens
CARDPPYYDILTGYYDGFGYYYYMDVW

SEQ ID NO: 53064 - protein, 14 aa, Homo sapiens
CARESPSGRHFDYW

SEQ ID NO: 53065 - protein, 22 aa, Homo sapiens
CARDGLKYYDSSGYQSFAFDIW

SEQ ID NO: 53066 - protein, 14 aa, Homo sapiens
CARADYSSGQFDFW

SEQ ID NO: 53067 - protein, 19 aa, Homo sapiens
CARGFWSGPPYYYYGMDVW

SEQ ID NO: 53068 - protein, 19 aa, Homo sapiens
CARMTTPDPFYYYYGMDVW

SEQ ID NO: 53069 - protein, 19 aa, Homo sapiens
CARETRDITIFGANWFDPW

SEQ ID NO: 53070 - protein, 15 aa, Homo sapiens
CAIFPPTGGDAFDIW

SEQ ID NO: 53071 - protein, 27 aa, Homo sapiens
CARGGCSSTSCYVGGGGIYYYYYMDVW

SEQ ID NO: 53072 - protein, 17 aa, Homo sapiens
CAKDRQTYSNTGWFDPW

SEQ ID NO: 53073 - protein, 17 aa, Homo sapiens
CASGYSSPPYYYGMDVW

SEQ ID NO: 53074 - protein, 21 aa, Homo sapiens
CARNDHRYCSSTSCSDAFDIW

SEQ ID NO: 53075 - protein, 22 aa, Homo sapiens
CCARAARSGGYSLYYYYYMDVW

SEQ ID NO: 53076 - protein, 17 aa, Homo sapiens
CARGSSQWLINNWFDPW

SEQ ID NO: 53077 - protein, 21 aa, Homo sapiens
CARDGQGVVQGDIIYNWFDPW

SEQ ID NO: 53078 - protein, 26 aa, Homo sapiens
CAKDGLRIDYDILTGYYRPWFYFDYW

SEQ ID NO: 53079 - protein, 20 aa, Homo sapiens
CARAESCTGGICQGTYFEHW

SEQ ID NO: 53080 - protein, 21 aa, Homo sapiens
CASIKFDYGDYVGGDWYFDLW

SEQ ID NO: 53081 - protein, 17 aa, Homo sapiens
CARQFYDHWNGFPFDSW

SEQ ID NO: 53082 - protein, 21 aa, Homo sapiens
CARDWVYCSGGSCAQQYFDYW

SEQ ID NO: 53083 - protein, 19 aa, Homo sapiens
CARADYGSGSYYKNWFDPW

SEQ ID NO: 53084 - protein, 17 aa, Homo sapiens
CARIRDCWLFHTGFDYW

SEQ ID NO: 53085 - protein, 22 aa, Homo sapiens
CARDTPQDYDFWSGYTGIFDYW

SEQ ID NO: 53086 - protein, 22 aa, Homo sapiens
CARFGSYYPYYLGITVASFDYW

SEQ ID NO: 53087 - protein, 19 aa, Homo sapiens
CARDPSYYDSSGWYYFDYW

SEQ ID NO: 53088 - protein, 22 aa, Homo sapiens
CARDCGDCYSWGDVGHNWFDPW

SEQ ID NO: 53089 - protein, 15 aa, Homo sapiens
CATFIGVRGTWYDYW

SEQ ID NO: 53090 - protein, 18 aa, Homo sapiens
CARDPISITGTTGSDDYW

SEQ ID NO: 53091 - protein, 17 aa, Homo sapiens
CARDIPNFIDDYGADYW

SEQ ID NO: 53092 - protein, 27 aa, Homo sapiens
CARGGLPFSGYSATADPYYYYYGLDVW

SEQ ID NO: 53093 - protein, 19 aa, Homo sapiens
CAREGYDSSGYPKTHFDYW

SEQ ID NO: 53094 - protein, 14 aa, Homo sapiens
CTRVFEQLVIVDYW

SEQ ID NO: 53095 - protein, 15 aa, Homo sapiens
CARIVDGFWPGFDYW

SEQ ID NO: 53096 - protein, 21 aa, Homo sapiens
CARGVNIAARRGDYYYGMDVW

SEQ ID NO: 53097 - protein, 18 aa, Homo sapiens
CAHSALIAAAGENWFDPW

SEQ ID NO: 53098 - protein, 18 aa, Homo sapiens
CARAVDGLRDYYYYMDVW

SEQ ID NO: 53099 - protein, 16 aa, Homo sapiens
CARGDGMITSYYMDVW

SEQ ID NO: 53100 - protein, 15 aa, Homo sapiens
CARATSYGGNSLDYW

SEQ ID NO: 53101 - protein, 18 aa, Homo sapiens
CARESAGLIVGATGFDYW

SEQ ID NO: 53102 - protein, 20 aa, Homo sapiens
CARHKVTTVTETYYYGMDVW

SEQ ID NO: 53103 - protein, 22 aa, Homo sapiens
CTAEYPYYDYIWGSYRINFDYW

SEQ ID NO: 53104 - protein, 21 aa, Homo sapiens
CASATILEWLFPAHYYYMDVW

SEQ ID NO: 53105 - protein, 16 aa, Homo sapiens
CATGSTVNWNYWFDPW

SEQ ID NO: 53106 - protein, 15 aa, Homo sapiens
CARHHSMAQTHFDYW

SEQ ID NO: 53107 - protein, 18 aa, Homo sapiens
CAKELHTVTRDPYYFDYW

SEQ ID NO: 53108 - protein, 25 aa, Homo sapiens
CARDALWFRELLYSADYYYYGMDVW

SEQ ID NO: 53109 - protein, 21 aa, Homo sapiens
CARVGLGYCSGGSCFNAFDIW

SEQ ID NO: 53110 - protein, 17 aa, Homo sapiens
CARAAGYVGELDAFDIW

SEQ ID NO: 53111 - protein, 17 aa, Homo sapiens
CARDSREWELQEPFDYW

SEQ ID NO: 53112 - protein, 13 aa, Homo sapiens
CARGDYDFKFDYW

SEQ ID NO: 53113 - protein, 18 aa, Homo sapiens
CAKDSSSGWRPNWYFDLW

SEQ ID NO: 53114 - protein, 15 aa, Homo sapiens
CAREQDVGFFPFDPW

SEQ ID NO: 53115 - protein, 17 aa, Homo sapiens
CAASRGSGWSYDAFDIW

SEQ ID NO: 53116 - protein, 16 aa, Homo sapiens
CARTYSGSYYIWFDPW

SEQ ID NO: 53117 - protein, 23 aa, Homo sapiens
CARDDSSGWYSPAYYYYYGMDVW

SEQ ID NO: 53118 - protein, 17 aa, Homo sapiens
CATIHSYCSSTSCVDYW

SEQ ID NO: 53119 - protein, 19 aa, Homo sapiens
CARHDFWSGHYRGYYFDYW

SEQ ID NO: 53120 - protein, 14 aa, Homo sapiens
CAKLIAVEDLFDYW

SEQ ID NO: 53121 - protein, 24 aa, Homo sapiens
CARDALHYDFWSGMPYYYYGMDVW

SEQ ID NO: 53122 - protein, 16 aa, Homo sapiens
CARESYDFWSGRFDPW

SEQ ID NO: 53123 - protein, 18 aa, Homo sapiens
CARLSDILTGYYYGMDVW

SEQ ID NO: 53124 - protein, 19 aa, Homo sapiens
CARDRPPLYGDSPDAFDIW

SEQ ID NO: 53125 - protein, 14 aa, Homo sapiens
CAHRITMIVAFDIW

SEQ ID NO: 53126 - protein, 29 aa, Homo sapiens
CARAPYYDFWSGYYIEASGHYYYYGMDVW

SEQ ID NO: 53127 - protein, 23 aa, Homo sapiens
CARSLSAYYDILTGYYPYYMDVW

SEQ ID NO: 53128 - protein, 17 aa, Homo sapiens
CATDWAWVKSGSFLDYW

SEQ ID NO: 53129 - protein, 18 aa, Homo sapiens
CARVYQDYGDYADWFDPW

SEQ ID NO: 53130 - protein, 22 aa, Homo sapiens
CARERYFDWLFRSSVVDAFDIW

SEQ ID NO: 53131 - protein, 17 aa, Homo sapiens
CARDRGVDDWLSTFDYW

SEQ ID NO: 53132 - protein, 25 aa, Homo sapiens
CARGKGEITGTPTAYYYYYYYMDVW

SEQ ID NO: 53133 - protein, 18 aa, Homo sapiens
CATASGYPTHDRFWFDPW

SEQ ID NO: 53134 - protein, 27 aa, Homo sapiens
CARHENYYDSSGYYWDPSGYYYYMDVW

SEQ ID NO: 53135 - protein, 18 aa, Homo sapiens
CARDSGGGSSRSGAFDIW

SEQ ID NO: 53136 - protein, 20 aa, Homo sapiens
CAKDGLGWELLSDLYYFDYW

SEQ ID NO: 53137 - protein, 23 aa, Homo sapiens
CVRDTPFAMTAQLKDGDDAFDIW

SEQ ID NO: 53138 - protein, 14 aa, Homo sapiens
CCRNGDYSSWFDPW

SEQ ID NO: 53139 - protein, 21 aa, Homo sapiens
CARTSYLAAAGTGYYYGMDVW

SEQ ID NO: 53140 - protein, 25 aa, Homo sapiens
CARTPQTYYYDSSGYPVQLDYFDYW

SEQ ID NO: 53141 - protein, 16 aa, Homo sapiens
CSSWVYGDHVNYFHFW

SEQ ID NO: 53142 - protein, 23 aa, Homo sapiens
CARDARERGYVEMATMGPYFDYW

SEQ ID NO: 53143 - protein, 20 aa, Homo sapiens
CARGRRETESGYYSYYFDYW

SEQ ID NO: 53144 - protein, 15 aa, Homo sapiens
CARGDSSSWSQIDYW

SEQ ID NO: 53145 - protein, 20 aa, Homo sapiens
CASAYCSGGSCYWDDAFDIW

SEQ ID NO: 53146 - protein, 21 aa, Homo sapiens
CARGAGDYYGSGSSIYYFDYW

SEQ ID NO: 53147 - protein, 20 aa, Homo sapiens
CARGSLVVPAAEGERHFDYW

SEQ ID NO: 53148 - protein, 18 aa, Homo sapiens
CARVRAAAGTGAAWFDPW

SEQ ID NO: 53149 - protein, 21 aa, Homo sapiens
CARGHWKLGDYHYYYYGMDVW

SEQ ID NO: 53150 - protein, 17 aa, Homo sapiens
CTLRADYSSYYYYMDVW

SEQ ID NO: 53151 - protein, 20 aa, Homo sapiens
CAREDSYYFDGGGYYYLDYW

SEQ ID NO: 53152 - protein, 18 aa, Homo sapiens
CARGTYYDPSGYYEGDYW

SEQ ID NO: 53153 - protein, 24 aa, Homo sapiens
CARDRRIDPYITIFGVVTANFDYW

SEQ ID NO: 53154 - protein, 23 aa, Homo sapiens
CARDIGRTIFGVVHTIENWFDPW

SEQ ID NO: 53155 - protein, 31 aa, Homo sapiens
CARDHVVGFTGDIVVVPAAAPDYYYYGMDVW

SEQ ID NO: 53156 - protein, 18 aa, Homo sapiens
CATDPTHCSATICPTDYW

SEQ ID NO: 53157 - protein, 17 aa, Homo sapiens
CARGPFGWELSGYFDYW

SEQ ID NO: 53158 - protein, 21 aa, Homo sapiens
CAKDISRITIFGVVIRYFDYW

SEQ ID NO: 53159 - protein, 16 aa, Homo sapiens
CARRPWGGSTYYFDYW

SEQ ID NO: 53160 - protein, 18 aa, Homo sapiens
CARSAQWQPPNYWYFDLW

SEQ ID NO: 53161 - protein, 18 aa, Homo sapiens
CARIHYDILTGGRYFDYW

SEQ ID NO: 53162 - protein, 17 aa, Homo sapiens
CARDQDEWELLGEFDYW

SEQ ID NO: 53163 - protein, 24 aa, Homo sapiens
CARGLPNYDILTGYSANNNWFDPW

SEQ ID NO: 53164 - protein, 19 aa, Homo sapiens
CARDWNGDYYDSSGVIDYW

SEQ ID NO: 53165 - protein, 20 aa, Homo sapiens
CARGPYSSSWYGSKNWFDPW

SEQ ID NO: 53166 - protein, 17 aa, Homo sapiens
CARDFRDYSNYVPLDYW

SEQ ID NO: 53167 - protein, 20 aa, Homo sapiens
CARGFRYCSSTSCYPWFDPW

SEQ ID NO: 53168 - protein, 17 aa, Homo sapiens
CARASWALSGYYYFDYW

SEQ ID NO: 53169 - protein, 17 aa, Homo sapiens
CARGGPGDYFWTAFGYW

SEQ ID NO: 53170 - protein, 21 aa, Homo sapiens
CARYTNYYGSGSIYYYGMDVW

SEQ ID NO: 53171 - protein, 24 aa, Homo sapiens
CARDLWKSSSSSGYYYYYYGMDVW

SEQ ID NO: 53172 - protein, 20 aa, Homo sapiens
CSTLLRSGAFRFPLTLFDSW

SEQ ID NO: 53173 - protein, 16 aa, Homo sapiens
CASFTANDYGDGFDYW

SEQ ID NO: 53174 - protein, 14 aa, Homo sapiens
CVRESASSSSLDYW

SEQ ID NO: 53175 - protein, 17 aa, Homo sapiens
CARDLSPDWNDSHLDYW

SEQ ID NO: 53176 - protein, 17 aa, Homo sapiens
CARLEMVFGVVQAFDIW

SEQ ID NO: 53177 - protein, 15 aa, Homo sapiens
CARHITGTTYYMDVW

SEQ ID NO: 53178 - protein, 27 aa, Homo sapiens
CAKDISLTYDFWSGYYRGYYYYGMDVW

SEQ ID NO: 53179 - protein, 21 aa, Homo sapiens
CARHTIYCSSTSCYEVWFDPW

SEQ ID NO: 53180 - protein, 12 aa, Homo sapiens
CARESLVLVDYW

SEQ ID NO: 53181 - protein, 21 aa, Homo sapiens
CARLPSGDFWSGYGFGWFDPW

SEQ ID NO: 53182 - protein, 20 aa, Homo sapiens
CARGGYQGIVVVVVANIDYW

SEQ ID NO: 53183 - protein, 16 aa, Homo sapiens
CARHMGPSTYYEFDYW

SEQ ID NO: 53184 - protein, 21 aa, Homo sapiens
CAREGRIYYGSGILLNWFDPW

SEQ ID NO: 53185 - protein, 19 aa, Homo sapiens
CAVLGYYDILTGLGSFDYW

SEQ ID NO: 53186 - protein, 18 aa, Homo sapiens
CARRITIFGVALGAFDIW

SEQ ID NO: 53187 - protein, 21 aa, Homo sapiens
CARVGGDGLDYYGSGSLFDYW

SEQ ID NO: 53188 - protein, 7 aa, Homo sapiens [sequence omitted]

SEQ ID NO: 53189 - protein, 26 aa, Homo sapiens
CARDVLSNYDYIWGSYRYSSGFFDYW

SEQ ID NO: 53190 - protein, 16 aa, Homo sapiens
CTRMWSGSYTSHLDYW

SEQ ID NO: 53191 - protein, 17 aa, Homo sapiens
CARDAPGGGWTQYFDYW

SEQ ID NO: 53192 - protein, 20 aa, Homo sapiens
CARHPTYCSSTSCYALFDYW

SEQ ID NO: 53193 - protein, 19 aa, Homo sapiens
CASLKGVNDYGDHDAFDIW

SEQ ID NO: 53194 - protein, 30 aa, Homo sapiens
CARDSTRSEYYDFWSGYPLAKYYYYGMDVW

SEQ ID NO: 53195 - protein, 16 aa, Homo sapiens
CAGGQGGNYYYGMDVW

SEQ ID NO: 53196 - protein, 16 aa, Homo sapiens
CARHLAVAFDPYFDYW

SEQ ID NO: 53197 - protein, 17 aa, Homo sapiens
CAREDFGVVIYWYFDLW

SEQ ID NO: 53198 - protein, 16 aa, Homo sapiens
CAKDLRGYDYDGMDVW

SEQ ID NO: 53199 - protein, 21 aa, Homo sapiens
CAREPDYYDSSGYYYGYFDYW

SEQ ID NO: 53200 - protein, 17 aa, Homo sapiens
CATDYALHSSGYDFPYW

SEQ ID NO: 53201 - protein, 26 aa, Homo sapiens
CARDATYYDFWSGYPQTYIRDYFDYW

SEQ ID NO: 53202 - protein, 20 aa, Homo sapiens
CARALNRRIAARRIYYFDYW

SEQ ID NO: 53203 - protein, 16 aa, Homo sapiens
CARDPFTMGDYYMDVW

SEQ ID NO: 53204 - protein, 14 aa, Homo sapiens [sequence omitted]

SEQ ID NO: 53205 - protein, 16 aa, Homo sapiens
CARVAPSGAAGYFDYW

SEQ ID NO: 53206 - protein, 16 aa, Homo sapiens
CATTTIFGRDNWFDPW

SEQ ID NO: 53207 - protein, 19 aa, Homo sapiens
CARDYEVDDSYYYYYMDVW

SEQ ID NO: 53208 - protein, 18 aa, Homo sapiens
CARDSPGSLVWLAHFDYW

SEQ ID NO: 53209 - protein, 22 aa, Homo sapiens
CARHTYYYDSSGYRRCEGFDYW

SEQ ID NO: 53210 - protein, 16 aa, Homo sapiens
CAHRPGGYYYGRYDYW

SEQ ID NO: 53211 - protein, 19 aa, Homo sapiens
CAREELFGMYVTTTYFSYW

SEQ ID NO: 53212 - protein, 16 aa, Homo sapiens
CATAYAVLASTPFDYW

SEQ ID NO: 53213 - protein, 20 aa, Homo sapiens
CARAQVIEWGLSTMNPFDYW

SEQ ID NO: 53214 - protein, 17 aa, Homo sapiens
CARQTVRFLEWYPFDYW

SEQ ID NO: 53215 - protein, 20 aa, Homo sapiens
CARDYYDYIWGSYHDAFDIW

SEQ ID NO: 53216 - protein, 15 aa, Homo sapiens
CAKDTLPADGWFDPW

SEQ ID NO: 53217 - protein, 15 aa, Homo sapiens
CARDPGFRELMMDYW

SEQ ID NO: 53218 - protein, 16 aa, Homo sapiens
CAREACSGGSCYFDYW

SEQ ID NO: 53219 - protein, 21 aa, Homo sapiens
CARNYVTGVAGAGHPQVFDHW

SEQ ID NO: 53220 - protein, 16 aa, Homo sapiens
CAHRPPVFNGGCFDYW

SEQ ID NO: 53221 - protein, 23 aa, Homo sapiens
CARGVKDYGLGSYFNPQTWFDPW

SEQ ID NO: 53222 - protein, 19 aa, Homo sapiens
CTLYAALYGDYEVYYMDVW

SEQ ID NO: 53223 - protein, 23 aa, Homo sapiens
CAREETSVGTTLPPNYYYYMDVW

SEQ ID NO: 53224 - protein, 13 aa, Homo sapiens
CTSSRSGYYKEYW

SEQ ID NO: 53225 - protein, 21 aa, Homo sapiens
CARDQNTIVVVPPAIGWFDPW

SEQ ID NO: 53226 - protein, 19 aa, Homo sapiens
CARELIYEGDYYYYYMDVW

SEQ ID NO: 53227 - protein, 21 aa, Homo sapiens
CARNKLHFLDWSNRLDAFDLW

SEQ ID NO: 53228 - protein, 24 aa, Homo sapiens
CARDLWFRELGLGEYYYYYGMDVW

SEQ ID NO: 53229 - protein, 18 aa, Homo sapiens
CARDRLYDFWSEGYFDYW

SEQ ID NO: 53230 - protein, 20 aa, Homo sapiens
CARHTRYCSGGSCSNWFDPW

SEQ ID NO: 53231 - protein, 19 aa, Homo sapiens
CARDCSSTSCPWRDAFDIW

SEQ ID NO: 53232 - protein, 16 aa, Homo sapiens
CAHRKTTVTTVSFDPW

SEQ ID NO: 53233 - protein, 16 aa, Homo sapiens
CAKAGVAAPDAYFDYW

SEQ ID NO: 53234 - protein, 24 aa, Homo sapiens
CARDPTMVQGVGEAYYYYYGMDVW

SEQ ID NO: 53235 - protein, 17 aa, Homo sapiens
CARARRKAYSHYLFDSW

SEQ ID NO: 53236 - protein, 11 aa, Homo sapiens
CTQLTHFPWAF

SEQ ID NO: 53237 - protein, 15 aa, Homo sapiens
CAHRTGILYSGFDPW

SEQ ID NO: 53238 - protein, 20 aa, Homo sapiens
CARSPNYYDSSGYLGGFDYW

SEQ ID NO: 53239 - protein, 18 aa, Homo sapiens
CARGGDFWSGHYDAFDYW

SEQ ID NO: 53240 - protein, 20 aa, Homo sapiens
CARGAPSYGGSWYSEYFQHW

SEQ ID NO: 53241 - protein, 20 aa, Homo sapiens
CAWSGYYTWNYYYYYGMDVW

SEQ ID NO: 53242 - protein, 25 aa, Homo sapiens
CARAAYDYIWGSYRLGPPTYYFDYW

SEQ ID NO: 53243 - protein, 19 aa, Homo sapiens
CARGDMDSSSWYGFRCDYW

SEQ ID NO: 53244 - protein, 26 aa, Homo sapiens
CASHMDIVATILPNRPDYYYYGMDVW

SEQ ID NO: 53245 - protein, 19 aa, Homo sapiens
CARERINSYGPQNYYMDVW

SEQ ID NO: 53246 - protein, 16 aa, Homo sapiens
CAHRRILAAAADFDYW

SEQ ID NO: 53247 - protein, 19 aa, Homo sapiens
CARGGGWFRELLSDPLDYW

SEQ ID NO: 53248 - protein, 22 aa, Homo sapiens
CAKDTKDWLTYDFWSGYYWDYW

SEQ ID NO: 53249 - protein, 15 aa, Homo sapiens
CAVLVGAPLNAFDIW

SEQ ID NO: 53250 - protein, 17 aa, Homo sapiens
CAKDSYSTRTQYYFDYW

SEQ ID NO: 53251 - protein, 18 aa, Homo sapiens
CARDYSSGYYVFYYFDYW

SEQ ID NO: 53252 - protein, 20 aa, Homo sapiens
CARDFPTYNYGDYVGSGDYW

SEQ ID NO: 53253 - protein, 29 aa, Homo sapiens
CAKDDAYYDFWSGYLGGRDYYYYYGMDVW

SEQ ID NO: 53254 - protein, 19 aa, Homo sapiens
CSGGSCYSGFDYYYYMDVW

SEQ ID NO: 53255 - protein, 21 aa, Homo sapiens
CARDDRYCSGGSCYSVWFDPW

SEQ ID NO: 53256 - protein, 22 aa, Homo sapiens
CAKPTYCGGDCYSRGDYYFDYW

SEQ ID NO: 53257 - protein, 11 aa, Homo sapiens
CARMAPDFDYW

SEQ ID NO: 53258 - protein, 12 aa, Homo sapiens
CQSYDNSLNYLF

SEQ ID NO: 53259 - protein, 22 aa, Homo sapiens
CATYTYCSSTSCPGYYYYMDVW

SEQ ID NO: 53260 - protein, 16 aa, Homo sapiens
CARESRDGYNRNFDYW

SEQ ID NO: 53261 - protein, 23 aa, Homo sapiens
CASEGLRGNYDFWSGGGYYFDYW

SEQ ID NO: 53262 - protein, 22 aa, Homo sapiens
CARDSRYSDTSGHYYVGGFDVW

SEQ ID NO: 53263 - protein, 23 aa, Homo sapiens
CARDGAPLIRYFDWLGAYYFDYW

SEQ ID NO: 53264 - protein, 17 aa, Homo sapiens
CARAQQYYPNLNWFDPW

SEQ ID NO: 53265 - protein, 17 aa, Homo sapiens
CARARRLRPTESAFDIW

SEQ ID NO: 53266 - protein, 14 aa, Homo sapiens
CAKVGDYSGTGDYW

SEQ ID NO: 53267 - protein, 23 aa, Homo sapiens
CARTSSSWYAVPWAGRENWFDPW

SEQ ID NO: 53268 - protein, 17 aa, Homo sapiens
CARDRVSSSWYDGMDVW

SEQ ID NO: 53269 - protein, 15 aa, Homo sapiens
CARELDSSGYYPYYW

SEQ ID NO: 53270 - protein, 17 aa, Homo sapiens
CARHNDDSDSPSWFDPW

SEQ ID NO: 53271 - protein, 13 aa, Homo sapiens
CQSSDSSGGFVLF

SEQ ID NO: 53272 - protein, 19 aa, Homo sapiens
CAREPLLYYYGSGYYFDHW

SEQ ID NO: 53273 - protein, 20 aa, Homo sapiens
CARVGSIVGALNYYYYMDVW

SEQ ID NO: 53274 - protein, 21 aa, Homo sapiens
CAREDLAIQGEHYYYYGMDVW

SEQ ID NO: 53275 - protein, 19 aa, Homo sapiens
CARDFPPIVATSENAFDIW

SEQ ID NO: 53276 - protein, 21 aa, Homo sapiens
CAHRQVGYYYDSSGSNPFDPW

SEQ ID NO: 53277 - protein, 17 aa, Homo sapiens
CARESLEWLFSYYFDYW

SEQ ID NO: 53278 - protein, 18 aa, Homo sapiens
CTRVGETAMVLHNWFDPW

SEQ ID NO: 53279 - protein, 13 aa, Homo sapiens
CATNPGRYYMDVW

SEQ ID NO: 53280 - protein, 16 aa, Homo sapiens
CARRMTTLKTDGFDIW

SEQ ID NO: 53281 - protein, 16 aa, Homo sapiens
CASVTVTSNDHAFDIW

SEQ ID NO: 53282 - protein, 15 aa, Homo sapiens
CARGGVEYDHWFDPW

SEQ ID NO: 53283 - protein, 17 aa, Homo sapiens
CAHQYLTIFGVVIFDYW

SEQ ID NO: 53284 - protein, 19 aa, Homo sapiens
CARQRRRWLQLYPDAFDIW

SEQ ID NO: 53285 - protein, 18 aa, Homo sapiens
CARVLTTTVWVYMGFDYW

SEQ ID NO: 53286 - protein, 14 aa, Homo sapiens
CAAIAAAGNYMDVW

SEQ ID NO: 53287 - protein, 17 aa, Homo sapiens
CARHLRGAYGRGDFDYW

SEQ ID NO: 53288 - protein, 28 aa, Homo sapiens
CARHGQYYDFWSGYLVGSDRAGWYFDLW

SEQ ID NO: 53289 - protein, 14 aa, Homo sapiens
CARILCSGYDGDYW

SEQ ID NO: 53290 - protein, 15 aa, Homo sapiens
CARDGGGDDDAFDMW

SEQ ID NO: 53291 - protein, 24 aa, Homo sapiens
CARDSTTNQYDILTGYYPYYFDYW

SEQ ID NO: 53292 - protein, 23 aa, Homo sapiens
CARDRELEAGGTYYYYYYYMDVW

SEQ ID NO: 53293 - protein, 21 aa, Homo sapiens
CARDRLVVVQRAPYYYGMDVW

SEQ ID NO: 53294 - protein, 20 aa, Homo sapiens
CARGGFDDYIWGSYRSIDYW

SEQ ID NO: 53295 - protein, 27 aa, Homo sapiens
CARGPLANYDFWSGPLGRPVHYYMDVW

SEQ ID NO: 53296 - protein, 16 aa, Homo sapiens
CAHRTTTVVTPFWDYW

SEQ ID NO: 53297 - protein, 16 aa, Homo sapiens
CAKDHTYGDYTYFDYW

SEQ ID NO: 53298 - protein, 17 aa, Homo sapiens
CARERGEYRGGWYIDYW

SEQ ID NO: 53299 - protein, 16 aa, Homo sapiens
CARYPNIVNTNYYDYW

SEQ ID NO: 53300 - protein, 23 aa, Homo sapiens
CARGEFLVVQGVGGYYYYGMDVW

SEQ ID NO: 53301 - protein, 21 aa, Homo sapiens
CAKTADSSTSLYYYYYGMDVW

SEQ ID NO: 53302 - protein, 19 aa, Homo sapiens
CARDKGVVEAPLLDVFDIW

SEQ ID NO: 53303 - protein, 17 aa, Homo sapiens
CAKVSSSGYQDDAFDIW

SEQ ID NO: 53304 - protein, 16 aa, Homo sapiens
CASTLSSGWDNAFDIW

SEQ ID NO: 53305 - protein, 16 aa, Homo sapiens
CATGHPWELLGWFDPW

SEQ ID NO: 53306 - protein, 23 aa, Homo sapiens
CATDYCSGGSCYPDYYYYYMDVW

SEQ ID NO: 53307 - protein, 22 aa, Homo sapiens
CARAPAVYSSGWYGDPDAFDIW

SEQ ID NO: 53308 - protein, 23 aa, Homo sapiens
CARDRVGYCSGGSCSDWRGFDPW

SEQ ID NO: 53309 - protein, 14 aa, Homo sapiens
CARPSSDISGFTYW

SEQ ID NO: 53310 - protein, 19 aa, Homo sapiens
CARMGYDYGDYDGSGVDYW

SEQ ID NO: 53311 - protein, 21 aa, Homo sapiens
CARLVELRYFDWPFSSHFDYW

SEQ ID NO: 53312 - protein, 16 aa, Homo sapiens
CASGYDPQDSRSFDYW

SEQ ID NO: 53313 - protein, 18 aa, Homo sapiens
CASNTISSISYYYAMDVW

SEQ ID NO: 53314 - protein, 32 aa, Homo sapiens
CARDSSSPDYDFWSGYLNPILDYYYYYGMDVW

SEQ ID NO: 53315 - protein, 19 aa, Homo sapiens
CARHERQWLVPRPRHFDYW

SEQ ID NO: 53316 - protein, 21 aa, Homo sapiens
CARDVHDMVQGVIITPWFDPW

SEQ ID NO: 53317 - protein, 22 aa, Homo sapiens
CARASYYDYIWGSYMGYYFDYW

SEQ ID NO: 53318 - protein, 16 aa, Homo sapiens
CARGSGTLYGDHYDYW

SEQ ID NO: 53319 - protein, 21 aa, Homo sapiens
CARVNGGMTTVTISGGWFDPW

SEQ ID NO: 53320 - protein, 15 aa, Homo sapiens
CASFYGDYEDYMDVW

SEQ ID NO: 53321 - protein, 17 aa, Homo sapiens
CARVNAPNAARPWFDPW

SEQ ID NO: 53322 - protein, 18 aa, Homo sapiens
CARDFGIGSSWDDVMDYW

SEQ ID NO: 53323 - protein, 21 aa, Homo sapiens
CARANYDYGDPRGYYYGMDVW

SEQ ID NO: 53324 - protein, 17 aa, Homo sapiens
CARDHGNTMVQGWFDPW

SEQ ID NO: 53325 - protein, 21 aa, Homo sapiens
CARLAVVVPAAIFIDGWFDPW

SEQ ID NO: 53326 - protein, 17 aa, Homo sapiens
CARDGNTYSTYAEFDPW

SEQ ID NO: 53327 - protein, 17 aa, Homo sapiens
CARTPTGTSDPYYFDFW

SEQ ID NO: 53328 - protein, 16 aa, Homo sapiens
CARIQTYPGPFGFDYW

SEQ ID NO: 53329 - protein, 18 aa, Homo sapiens
CARPSPLVAATSGAFDIW

SEQ ID NO: 53330 - protein, 16 aa, Homo sapiens
CARLVVAGRGDAFDIW

SEQ ID NO: 53331 - protein, 15 aa, Homo sapiens
CARSKVDDYSNYDYW

SEQ ID NO: 53332 - protein, 23 aa, Homo sapiens
CARGVTIFGVVIDSGYYYYMDVW

SEQ ID NO: 53333 - protein, 23 aa, Homo sapiens
CAREPYYYDSSGYFNLGNAFDIW

SEQ ID NO: 53334 - protein, 14 aa, Homo sapiens
CASLPAAGTIFDYW

SEQ ID NO: 53335 - protein, 27 aa, Homo sapiens
CARDLWDYYGSGSPLGGYYYYYGMDVW

SEQ ID NO: 53336 - protein, 20 aa, Homo sapiens
CARLRPGYSGYDLRGYFDYW

SEQ ID NO: 53337 - protein, 16 aa, Homo sapiens
CATVFAYGGLTHFDYW

SEQ ID NO: 53338 - protein, 22 aa, Homo sapiens
CAHRPRWDIVVVPAAATWFDPW

SEQ ID NO: 53339 - protein, 18 aa, Homo sapiens
CARSGSGYDEDQYYFDYW

SEQ ID NO: 53340 - protein, 20 aa, Homo sapiens
CVLPISRDHYGSGTYLFDYW

SEQ ID NO: 53341 - protein, 23 aa, Homo sapiens
CARDNYDIVSGPHGGYTPTFDSW

SEQ ID NO: 53342 - protein, 20 aa, Homo sapiens
CAKDTYYDFWSGYQGFVDYW

SEQ ID NO: 53343 - protein, 17 aa, Homo sapiens
CASEVPAMAPHGSSDYW

SEQ ID NO: 53344 - protein, 24 aa, Homo sapiens
CARDPGDTYYYGSGSYYPNWFDPW

SEQ ID NO: 53345 - protein, 17 aa, Homo sapiens
CARAEQWLDRGGYFDYW

SEQ ID NO: 53346 - protein, 18 aa, Homo sapiens
CAKDPTIVVVPAATFDYW

SEQ ID NO: 53347 - protein, 18 aa, Homo sapiens
CARDPIMGATQTDAFDIW

SEQ ID NO: 53348 - protein, 13 aa, Homo sapiens
CIQALQTPPMCSF

SEQ ID NO: 53349 - protein, 21 aa, Homo sapiens
CARDKLLITGTTPPPYYFDYW

SEQ ID NO: 53350 - protein, 19 aa, Homo sapiens
CAGTYYDILTGYYSWFDPW

SEQ ID NO: 53351 - protein, 14 aa, Homo sapiens
CARGTSGDNGLDPW

SEQ ID NO: 53352 - protein, 26 aa, Homo sapiens
CARDLEYYDILTGYYTFYYYYGMDVW

SEQ ID NO: 53353 - protein, 17 aa, Homo sapiens
CARAAWYCSSTSCFDYW

SEQ ID NO: 53354 - protein, 21 aa, Homo sapiens
CARGGCSSTSCYDRGTWFDPW

SEQ ID NO: 53355 - protein, 21 aa, Homo sapiens
CASFDDFWSGDKREPNWFDPW

SEQ ID NO: 53356 - protein, 22 aa, Homo sapiens
CARESPALSDDSSGWYGEIDYW

SEQ ID NO: 53357 - protein, 21 aa, Homo sapiens
CTKDRYYHASSGYPSYYFDYW

SEQ ID NO: 53358 - protein, 17 aa, Homo sapiens
CAKEHIAARPQWTFDYW

SEQ ID NO: 53359 - protein, 21 aa, Homo sapiens
CARGRSYNDFWSGPGYYFDYW

SEQ ID NO: 53360 - protein, 28 aa, Homo sapiens
CARDVTRDYYDSSGYYYAAPLTGWCDYW

SEQ ID NO: 53361 - protein, 20 aa, Homo sapiens
CARNYDILTGYLYYYGMDVW

SEQ ID NO: 53362 - protein, 22 aa, Homo sapiens
CARTNTERISVGGTFFSWFDPW

SEQ ID NO: 53363 - protein, 18 aa, Homo sapiens
CARESEHYDILTRDFDYW

SEQ ID NO: 53364 - protein, 14 aa, Homo sapiens
CARHSDWVFYLDYW

SEQ ID NO: 53365 - protein, 20 aa, Homo sapiens
CAREGMGALEVVTAPHLDYW

SEQ ID NO: 53366 - protein, 22 aa, Homo sapiens
CARAQRRFLEWLFHYYYYMDVW

SEQ ID NO: 53367 - protein, 24 aa, Homo sapiens
CARSNDVVVPAATQSYYYYGMDVW

SEQ ID NO: 53368 - protein, 19 aa, Homo sapiens
CARDEESSGFYPSETFDYW

SEQ ID NO: 53369 - protein, 17 aa, Homo sapiens
CAKERSGIAAADHFDYW

SEQ ID NO: 53370 - protein, 34 aa, Homo sapiens
CARVPIGSGPQQLHLGELSLSAFGYYYYYYMDVW

SEQ ID NO: 53371 - protein, 19 aa, Homo sapiens
CARDGGGFRELTYHYFDSW

SEQ ID NO: 53372 - protein, 24 aa, Homo sapiens
CARIANPYPYCGGDCPPRTDFDYW

SEQ ID NO: 53373 - protein, 18 aa, Homo sapiens
CARDRNDYDSSGYYYGYW

SEQ ID NO: 53374 - protein, 15 aa, Homo sapiens
CAKNSWTTFDVFDVW

SEQ ID NO: 53375 - protein, 15 aa, Homo sapiens
CAREYGDYSAYFDLW

SEQ ID NO: 53376 - protein, 16 aa, Homo sapiens
CARDRSSRGHDALDIW

SEQ ID NO: 53377 - protein, 17 aa, Homo sapiens
CARAAVAGRAETSFDYW

SEQ ID NO: 53378 - protein, 15 aa, Homo sapiens
CYSTDNSGNLFNWVF

SEQ ID NO: 53379 - protein, 18 aa, Homo sapiens
CARDHSSSSPTSRAFDIW

SEQ ID NO: 53380 - protein, 16 aa, Homo sapiens
CASLFPPWSGDGLDIW

SEQ ID NO: 53381 - protein, 17 aa, Homo sapiens
CARSRSFEDDIDAFDIW

SEQ ID NO: 53382 - protein, 13 aa, Homo sapiens
CAREGEQWLGDYW

SEQ ID NO: 53383 - protein, 21 aa, Homo sapiens
CAREDLTMVQGVIITGWFDPW

SEQ ID NO: 53384 - protein, 21 aa, Homo sapiens
CARGYWGLRRPFYYYYGMDVW

SEQ ID NO: 53385 - protein, 19 aa, Homo sapiens
CARGGLYGDYSYYYGMDVW

SEQ ID NO: 53386 - protein, 16 aa, Homo sapiens
CASGERDMIPPEFDYW

SEQ ID NO: 53387 - protein, 19 aa, Homo sapiens
CARVIGMIQLLPRGAFDIW

SEQ ID NO: 53388 - protein, 22 aa, Homo sapiens
CARVRSSGRIVAIYYYYGMDVW

SEQ ID NO: 53389 - protein, 15 aa, Homo sapiens
CAKTSSGYDDSFDYW

SEQ ID NO: 53390 - protein, 22 aa, Homo sapiens
CARADSITMIVVRGPVDAFDIW

SEQ ID NO: 53391 - protein, 19 aa, Homo sapiens
CATDRSKYQLPNPNWFDPW

SEQ ID NO: 53392 - protein, 17 aa, Homo sapiens
CATFYGDYPDETAFDIW

SEQ ID NO: 53393 - protein, 16 aa, Homo sapiens
CASLTRTMSYEAFNIW

SEQ ID NO: 53394 - protein, 24 aa, Homo sapiens
CARLFQLNPWGSMWELLPGYFDYW

SEQ ID NO: 53395 - protein, 24 aa, Homo sapiens
CAKENAESWVITMVQGVINWFDPW

SEQ ID NO: 53396 - protein, 21 aa, Homo sapiens
CARGYWNGGGGDYYYYGMDVW

SEQ ID NO: 53397 - protein, 15 aa, Homo sapiens
CARISNSGWPAFDYW

SEQ ID NO: 53398 - protein, 20 aa, Homo sapiens
CARDFSDFVGSYYYYYMDVW

SEQ ID NO: 53399 - protein, 17 aa, Homo sapiens
CASSQGSGWYGYAFDIW

SEQ ID NO: 53400 - protein, 22 aa, Homo sapiens
CARDLVDYSNYESYYYYGMDVW

SEQ ID NO: 53401 - protein, 25 aa, Homo sapiens
CARYSSSPTEPGWSNYYYYYYMDVW

SEQ ID NO: 53402 - protein, 20 aa, Homo sapiens
CARDRVDYGDYVPDWYFDLW

SEQ ID NO: 53403 - protein, 24 aa, Homo sapiens
CARDPTTRGYDFWSGYLNYYMDVW

SEQ ID NO: 53404 - protein, 19 aa, Homo sapiens
CASHYDILTGYYMGYFDYW

SEQ ID NO: 53405 - protein, 17 aa, Homo sapiens
CARGSGEVVVITSFDYW

SEQ ID NO: 53406 - protein, 12 aa, Homo sapiens
CVRDPHSTADYW

SEQ ID NO: 53407 - protein, 16 aa, Homo sapiens
CARGSGWYNSPMDDYW

SEQ ID NO: 53408 - protein, 18 aa, Homo sapiens
CARDPRLGAAAGTWFDPW

SEQ ID NO: 53409 - protein, 24 aa, Homo sapiens
CARDYYGSGSYLGLALYYYYMDVW

SEQ ID NO: 53410 - protein, 23 aa, Homo sapiens
CARGVRHYDYIWGSSIGRIFDYW

SEQ ID NO: 53411 - protein, 14 aa, Homo sapiens
CAITRGRNQYADYW

SEQ ID NO: 53412 - protein, 14 aa, Homo sapiens
CASNGGRTSTFDIW

SEQ ID NO: 53413 - protein, 20 aa, Homo sapiens
CARETYDYIWGRLFAGFDYW

SEQ ID NO: 53414 - protein, 18 aa, Homo sapiens
CARRYSGYESFDNAFDIW

SEQ ID NO: 53415 - protein, 33 aa, Homo sapiens
CARDGVYYDILTGYFPSYVNLAPYYYYYYMDVW

SEQ ID NO: 53416 - protein, 15 aa, Homo sapiens
CAREGIYGDRDFDYW

SEQ ID NO: 53417 - protein, 22 aa, Homo sapiens
CARLRYYGSGSYDYYYYGMDVW

SEQ ID NO: 53418 - protein, 18 aa, Homo sapiens
CAHRPGSSWTRAGAFDIW

SEQ ID NO: 53419 - protein, 27 aa, Homo sapiens
CARDRPYYDFWSGYYVHGEYYYYMDVW

SEQ ID NO: 53420 - protein, 16 aa, Homo sapiens
CTYGDRHYYYYGMDVW

SEQ ID NO: 53421 - protein, 19 aa, Homo sapiens
CAREAYDYIWGRIDGMDVW

SEQ ID NO: 53422 - protein, 16 aa, Homo sapiens
CARHSDLPSKSYFDYW

SEQ ID NO: 53423 - protein, 20 aa, Homo sapiens
CAKLGISGYGDYNNDYIDYW

SEQ ID NO: 53424 - protein, 28 aa, Homo sapiens
CAAGEPELGYCSGGSCDGPYYYYGMDVW

SEQ ID NO: 53425 - protein, 21 aa, Homo sapiens
CARDRRDIVVVVAASDAFDIW

SEQ ID NO: 53426 - protein, 32 aa, Homo sapiens
CARDASYPYCSGGSCYIPAASEDYYYYGMDVW

SEQ ID NO: 53427 - protein, 19 aa, Homo sapiens
CARLVDSSALYPLSPGDYW

SEQ ID NO: 53428 - protein, 16 aa, Homo sapiens
CAAVGYSSGWYYIRYW

SEQ ID NO: 53429 - protein, 19 aa, Homo sapiens
CASPYCTGGVCYTIALDVW

SEQ ID NO: 53430 - protein, 17 aa, Homo sapiens
CARRYCSSSSCYYMDVW

SEQ ID NO: 53431 - protein, 21 aa, Homo sapiens
CASQDLYYYDSSGYNDAFDIW

SEQ ID NO: 53432 - protein, 16 aa, Homo sapiens
CAKGYGYTSSSHFDFW

SEQ ID NO: 53433 - protein, 19 aa, Homo sapiens
CARDLGILTGYYNGWFDPW

SEQ ID NO: 53434 - protein, 22 aa, Homo sapiens
CARGQLELREGYYYYYYYMDVW

SEQ ID NO: 53435 - protein, 22 aa, Homo sapiens
CARLPIEMATITPYYYYGMDVW

SEQ ID NO: 53436 - protein, 14 aa, Homo sapiens
CATEGVTRAPGDYW

SEQ ID NO: 53437 - protein, 24 aa, Homo sapiens
CARDDGNYYDSSGYYLGPSYFDYW

SEQ ID NO: 53438 - protein, 18 aa, Homo sapiens
CARDIGDYSNYVFWFDPW

SEQ ID NO: 53439 - protein, 20 aa, Homo sapiens
CARGGAWPNYGDDMWYFDYW

SEQ ID NO: 53440 - protein, 19 aa, Homo sapiens
CASGRSQNGDKRNWYFDLW

SEQ ID NO: 53441 - protein, 18 aa, Homo sapiens
CARDQLSMVQGVTHFDYW

SEQ ID NO: 53442 - protein, 18 aa, Homo sapiens
CARDPDSYSSSWKLFDYW

SEQ ID NO: 53443 - protein, 19 aa, Homo sapiens
CARSDVDIVATIGLAFDYW

SEQ ID NO: 53444 - protein, 20 aa, Homo sapiens
CARIPDYADCLQGDAWFDPW

SEQ ID NO: 53445 - protein, 17 aa, Homo sapiens
CAREGRGDWNYADFDYW

SEQ ID NO: 53446 - protein, 26 aa, Homo sapiens
CARDFKDYDFWSGYYPEYYYYYMDVW

SEQ ID NO: 53447 - protein, 20 aa, Homo sapiens
CARDGWWDCTGGVCYPFDYW

SEQ ID NO: 53448 - protein, 20 aa, Homo sapiens
CARDMIFYDSSGYPNWFDPW

SEQ ID NO: 53449 - protein, 24 aa, Homo sapiens
CARVRYRYDSSGYPYSYYYYMDVW

SEQ ID NO: 53450 - protein, 14 aa, Homo sapiens
CARISDTTMAFDYW

SEQ ID NO: 53451 - protein, 18 aa, Homo sapiens
CARGHYFDYGDSVYFDNW

SEQ ID NO: 53452 - protein, 14 aa, Homo sapiens
CARTICGRYHFDYW

SEQ ID NO: 53453 - protein, 19 aa, Homo sapiens
CARETYYYDSSGYPPLDYW

SEQ ID NO: 53454 - protein, 18 aa, Homo sapiens
CARARDIVVVPAAPLDYW

SEQ ID NO: 53455 - protein, 27 aa, Homo sapiens
CARGGDGPDYDYIWGIGRRGAEYFQHW

SEQ ID NO: 53456 - protein, 16 aa, Homo sapiens
CTRDLPKTRLPGFDVW

SEQ ID NO: 53457 - protein, 19 aa, Homo sapiens
CARMMAGYYLYYYYGMDVW

SEQ ID NO: 53458 - protein, 17 aa, Homo sapiens
CARAGYYDILVYYFDYW

SEQ ID NO: 53459 - protein, 20 aa, Homo sapiens
CARSDFDSSGYYPPGGLDYW

SEQ ID NO: 53460 - protein, 27 aa, Homo sapiens
CAKDLKSEPYDYYDSSGYYSGDAFDIW

SEQ ID NO: 53461 - protein, 15 aa, Homo sapiens
CAREESTTVNWLDPW

SEQ ID NO: 53462 - protein, 21 aa, Homo sapiens
CAKDEKADSSGYYYGDAFDIW

SEQ ID NO: 53463 - protein, 26 aa, Homo sapiens
CARDRIDHIGYSYGYWPEYYYGMDVW

SEQ ID NO: 53464 - protein, 17 aa, Homo sapiens
CARASTYDSSGLYFDYW

SEQ ID NO: 53465 - protein, 24 aa, Homo sapiens
CARDAEDYIWGSYRYSLGYYFDYW

SEQ ID NO: 53466 - protein, 20 aa, Homo sapiens
CARTSQYGIAGAWLEAFDIW

SEQ ID NO: 53467 - protein, 17 aa, Homo sapiens
CARGSHIVATILDFDYW

SEQ ID NO: 53468 - protein, 19 aa, Homo sapiens
CARHPYCYDATCQGGFDSW

SEQ ID NO: 53469 - protein, 22 aa, Homo sapiens
CARDSSHIDYYGSGWSYLFDYW

SEQ ID NO: 53470 - protein, 17 aa, Homo sapiens
CSSTSCYNYYYYGMDVW

SEQ ID NO: 53471 - protein, 27 aa, Homo sapiens
CARAPEGYCSGGSCYAVSYYYYYMDVW

SEQ ID NO: 53472 - protein, 16 aa, Homo sapiens
CATVPAWWGSSAMDVW

SEQ ID NO: 53473 - protein, 25 aa, Homo sapiens
CARGDANDCGGDCYSLGEGDYFDYW

SEQ ID NO: 53474 - protein, 26 aa, Homo sapiens
CARGKLEMVAAPETLLGYYYYGMDVW

SEQ ID NO: 53475 - protein, 17 aa, Homo sapiens
CTREYSGYDFQRPLDYW

SEQ ID NO: 53476 - protein, 15 aa, Homo sapiens
CARGGAYYYHYMDVW

SEQ ID NO: 53477 - protein, 15 aa, Homo sapiens
CARADGYNPPPFDYW

SEQ ID NO: 53478 - protein, 23 aa, Homo sapiens
CATTSPLIRMTTVTTTDYWFDPW

SEQ ID NO: 53479 - protein, 18 aa, Homo sapiens
CARAVGLGLGTEYYFDYW

SEQ ID NO: 53480 - protein, 22 aa, Homo sapiens
CARDRSPAGATDLGFYGYFDLW

SEQ ID NO: 53481 - protein, 17 aa, Homo sapiens
CARHQTTVTLNDAFDIW

SEQ ID NO: 53482 - protein, 22 aa, Homo sapiens
CAGHTYYYDSSGYPRVDAFDIW

SEQ ID NO: 53483 - protein, 19 aa, Homo sapiens
CARDPAPYDLSNHFNFDYW

SEQ ID NO: 53484 - protein, 22 aa, Homo sapiens
CARERPSNYLYSSSWAPYFDYW

SEQ ID NO: 53485 - protein, 18 aa, Homo sapiens
CAHKDRPAARPWWYFDLW

SEQ ID NO: 53486 - protein, 15 aa, Homo sapiens
CARSFRWGWRHFDFW

SEQ ID NO: 53487 - protein, 15 aa, Homo sapiens
CAKDPRQQLEEFDYW

SEQ ID NO: 53488 - protein, 27 aa, Homo sapiens
CARDSGVLGPARIGYYDSSGYYLYDYW

SEQ ID NO: 53489 - protein, 17 aa, Homo sapiens
CARQTGYSSGWSSFDYW

SEQ ID NO: 53490 - protein, 20 aa, Homo sapiens
CARDAAENYDYGDNNWFDPW

SEQ ID NO: 53491 - protein, 24 aa, Homo sapiens
CARGGTVITMVQGVIPLGSVFDPW

SEQ ID NO: 53492 - protein, 25 aa, Homo sapiens
CARDGGPYGSGSYPIFYYYYYMDVW

SEQ ID NO: 53493 - protein, 19 aa, Homo sapiens
CAKGSLIQATIQHWYFDLW

SEQ ID NO: 53494 - protein, 19 aa, Homo sapiens
CARGRELDRPYYYYYMDVW

SEQ ID NO: 53495 - protein, 24 aa, Homo sapiens
CAKVGSAAAGPNDAYYYYYGMDVW

SEQ ID NO: 53496 - protein, 18 aa, Homo sapiens
CARAKQQLGHYYYGMDVW

SEQ ID NO: 53497 - protein, 19 aa, Homo sapiens
CAREGVYSNSWAHDAFDIW

SEQ ID NO: 53498 - protein, 24 aa, Homo sapiens
CARMAGSWNDYSNYGNYYYYMDVW

SEQ ID NO: 53499 - protein, 22 aa, Homo sapiens
CARIRLLGAARIGYYYYGMDVW

SEQ ID NO: 53500 - protein, 17 aa, Homo sapiens
CARDSSSGWYLGAFDIW

SEQ ID NO: 53501 - protein, 17 aa, Homo sapiens
CGRVRTSIAVAGTIDYW

SEQ ID NO: 53502 - protein, 24 aa, Homo sapiens
CARDFVSQARKDIVVVPAGAMDVW

SEQ ID NO: 53503 - protein, 21 aa, Homo sapiens
CATTAPYYYDSSGPPGWFDPW

SEQ ID NO: 53504 - protein, 23 aa, Homo sapiens
CARIRPAIDDYGDYYVPEYFDYW

SEQ ID NO: 53505 - protein, 20 aa, Homo sapiens
CARMGPWGYSSGHTNAFDIW

SEQ ID NO: 53506 - protein, 19 aa, Homo sapiens
CATLGAALDIDYYYYMDVW

SEQ ID NO: 53507 - protein, 22 aa, Homo sapiens
CARSPSIAAARIPLVWWWFDPW

SEQ ID NO: 53508 - protein, 23 aa, Homo sapiens
CARGLYFDWLFFNGLDGNWFDPW

SEQ ID NO: 53509 - protein, 19 aa, Homo sapiens
CASQTLYYDLYYYYGMDVW

SEQ ID NO: 53510 - protein, 22 aa, Homo sapiens
CARGEGSSGWYLNYYYYYMDVW

SEQ ID NO: 53511 - protein, 22 aa, Homo sapiens
CAREEVRYKTGRLLWFRAFDIW

SEQ ID NO: 53512 - protein, 21 aa, Homo sapiens
CARGCSGGSCYIDYYYGMDVW

SEQ ID NO: 53513 - protein, 21 aa, Homo sapiens
CARDGEQWLRLGYYYYYMDVW

SEQ ID NO: 53514 - protein, 25 aa, Homo sapiens
CARDPNALYGARSSGPQQGGWFDPW

SEQ ID NO: 53515 - protein, 18 aa, Homo sapiens
CTITPSQYYYDSSGSDYW

SEQ ID NO: 53516 - protein, 20 aa, Homo sapiens
CARFYSDSSGYYWLSAFDIW

SEQ ID NO: 53517 - protein, 23 aa, Homo sapiens
CASSYPGIAAAGISYYYYGMDVW

SEQ ID NO: 53518 - protein, 16 aa, Homo sapiens
CAHRLGGWVSTGFDPW

SEQ ID NO: 53519 - protein, 17 aa, Homo sapiens
CASNYYDSSGYDAFDIW

SEQ ID NO: 53520 - protein, 21 aa, Homo sapiens
CARDFYYGSGSYYSPDWFDPW

SEQ ID NO: 53521 - protein, 17 aa, Homo sapiens
CARDYWPAKIISSFDIW

SEQ ID NO: 53522 - protein, 16 aa, Homo sapiens
CTRASEDFSPQYYDLW

SEQ ID NO: 53523 - protein, 18 aa, Homo sapiens
CASSFNYGDYEVWPPDYW

SEQ ID NO: 53524 - protein, 20 aa, Homo sapiens
CARRFRNCSSTSCYWYFDLW

SEQ ID NO: 53525 - protein, 23 aa, Homo sapiens
CARIRRVHDYIWGSYRYSPFDYW

SEQ ID NO: 53526 - protein, 15 aa, Homo sapiens
CASTYSGSYTALDYW

SEQ ID NO: 53527 - protein, 18 aa, Homo sapiens
CARFEKDFWSGYWGFDPW

SEQ ID NO: 53528 - protein, 23 aa, Homo sapiens
CARDLSIGSSWPVYYYYYGMDVW

SEQ ID NO: 53529 - protein, 17 aa, Homo sapiens
CARDKFNDYGDEYFQHW

SEQ ID NO: 53530 - protein, 19 aa, Homo sapiens
CARHGSHYYDSSGTYFDYW

SEQ ID NO: 53531 - protein, 25 aa, Homo sapiens
CARQYYYDSSGYYYPYYYYYGMDVW

SEQ ID NO: 53532 - protein, 17 aa, Homo sapiens
CARGEGTVTTLDWFDPW

SEQ ID NO: 53533 - protein, 16 aa, Homo sapiens
CARITAVTAADDFDFW

SEQ ID NO: 53534 - protein, 20 aa, Homo sapiens
CARVAELGELSLYYGGFDYW

SEQ ID NO: 53535 - protein, 16 aa, Homo sapiens
CARDDLQGSSFDFDYW

SEQ ID NO: 53536 - protein, 17 aa, Homo sapiens
CARSRRIVRVDDGFDIW

SEQ ID NO: 53537 - protein, 15 aa, Homo sapiens
CARSLPPRAGLYDYW

SEQ ID NO: 53538 - protein, 17 aa, Homo sapiens
CALRAGSTFGGVIVDYW

SEQ ID NO: 53539 - protein, 24 aa, Homo sapiens
CVKDPEQHYYGSGNYFKPKWFDPW

SEQ ID NO: 53540 - protein, 18 aa, Homo sapiens
CARRTYSSGWYRDYMDVW

SEQ ID NO: 53541 - protein, 22 aa, Homo sapiens
CARDMILEWLSFPLYYYGMDVW

SEQ ID NO: 53542 - protein, 25 aa, Homo sapiens
CARDPAPHLWSGYYPLYYYYYMDVW

SEQ ID NO: 53543 - protein, 19 aa, Homo sapiens
CSRATDQSFCGGDCHWDYW

SEQ ID NO: 53544 - protein, 23 aa, Homo sapiens
CARARRTTRSIAAAVLLDYFDYW

SEQ ID NO: 53545 - protein, 22 aa, Homo sapiens
CARDRDYIWGSYRTRPDAFDIW

SEQ ID NO: 53546 - protein, 16 aa, Homo sapiens
CARDMSGDWDWYFDLW

SEQ ID NO: 53547 - protein, 14 aa, Homo sapiens
CAKLLGGETSIDYW

SEQ ID NO: 53548 - protein, 12 aa, Homo sapiens
CARDGEDIFDPW

SEQ ID NO: 53549 - protein, 23 aa, Homo sapiens
CTRNERSYYDSSGYYRQYGMDVW

SEQ ID NO: 53550 - protein, 19 aa, Homo sapiens
CATLGDNWGGVDTNAFDIW

SEQ ID NO: 53551 - protein, 21 aa, Homo sapiens
CARDRGLYYDSSGEWDAFDIW

SEQ ID NO: 53552 - protein, 14 aa, Homo sapiens
CVRSQMMYTWFDPW

SEQ ID NO: 53553 - protein, 13 aa, Homo sapiens
CVREFSGGFFDYW

SEQ ID NO: 53554 - protein, 15 aa, Homo sapiens
CARSWAAAGNILDYW

SEQ ID NO: 53555 - protein, 17 aa, Homo sapiens
CARATIFGVDWGYFDYW

SEQ ID NO: 53556 - protein, 23 aa, Homo sapiens
CARLNGSGSYYNVMPEVKGFDPW

SEQ ID NO: 53557 - protein, 17 aa, Homo sapiens
CARDLFLEEGDWGFDPW

SEQ ID NO: 53558 - protein, 26 aa, Homo sapiens
CARLGGGADGVVVQGVMVYYYYMDVW

SEQ ID NO: 53559 - protein, 17 aa, Homo sapiens
CARHPYTGYDGDAFDIW

SEQ ID NO: 53560 - protein, 20 aa, Homo sapiens
CASGYCSSTSCYAVGWFDPW

SEQ ID NO: 53561 - protein, 21 aa, Homo sapiens
CARGGWSSGNTAYYYYGMDVW

SEQ ID NO: 53562 - protein, 20 aa, Homo sapiens
CARGEVSGYASGHYWYFDLW

SEQ ID NO: 53563 - protein, 13 aa, Homo sapiens
CSALDSSLSAWVF

SEQ ID NO: 53564 - protein, 16 aa, Homo sapiens
CAKGPALNGWGLFDYW

SEQ ID NO: 53565 - protein, 18 aa, Homo sapiens
CARRNLGESYGDLVIDYW

SEQ ID NO: 53566 - protein, 19 aa, Homo sapiens
CATTNYYDFWSGDNWFDPW

SEQ ID NO: 53567 - protein, 18 aa, Homo sapiens
CATAGVNWNDGSRAFDIW

SEQ ID NO: 53568 - protein, 17 aa, Homo sapiens
CARVASGGLGSYYTDHW

SEQ ID NO: 53569 - protein, 17 aa, Homo sapiens
CAKGSRPGDYGDHYDYW

SEQ ID NO: 53570 - protein, 21 aa, Homo sapiens
CASGLLWFRELPSEASPFDYW

SEQ ID NO: 53571 - protein, 16 aa, Homo sapiens
CARQTDHPSGSYFYYW

SEQ ID NO: 53572 - protein, 22 aa, Homo sapiens
CTTDDPSQYSSSPYYYYYMDVW

SEQ ID NO: 53573 - protein, 27 aa, Homo sapiens
CARGPPYYDFWSGYYTHHGDNYYFDYW

SEQ ID NO: 53574 - protein, 18 aa, Homo sapiens
CATDDVPFCGGECYFANW

SEQ ID NO: 53575 - protein, 17 aa, Homo sapiens
CARDRARERLDGAFDVW

SEQ ID NO: 53576 - protein, 20 aa, Homo sapiens
CAKDLALYSSSWYGTYFDYW

SEQ ID NO: 53577 - protein, 19 aa, Homo sapiens
CARDPLITIFGVLDAFDIW

SEQ ID NO: 53578 - protein, 17 aa, Homo sapiens
CARDASVAVRTDSFDYW

SEQ ID NO: 53579 - protein, 25 aa, Homo sapiens
CAREEYYDFWSGPGTSTNPNWFDPW

SEQ ID NO: 53580 - protein, 18 aa, Homo sapiens
CAKDRQYYYDSSASFDYW

SEQ ID NO: 53581 - protein, 23 aa, Homo sapiens
CARHVPDADDPYYDFWSGPFDYW

SEQ ID NO: 53582 - protein, 22 aa, Homo sapiens
CARGGGTLPTTLRYYYYYMDVW

SEQ ID NO: 53583 - protein, 14 aa, Homo sapiens
CAGSSWPPLRVDYW

SEQ ID NO: 53584 - protein, 22 aa, Homo sapiens
CARGGGYDFWSGYRYYYYMDVW

SEQ ID NO: 53585 - protein, 23 aa, Homo sapiens
CARHPYMTRYFDWRIGTRAFDIW

SEQ ID NO: 53586 - protein, 24 aa, Homo sapiens
CAKDLRLLGYCSGGSCYSDAFDIW

SEQ ID NO: 53587 - protein, 22 aa, Homo sapiens
CATDSLYCSGGSCYPARYFQHW

SEQ ID NO: 53588 - protein, 18 aa, Homo sapiens
CARDGLLRYSSSWSFDYW

SEQ ID NO: 53589 - protein, 12 aa, Homo sapiens
CGAGLLNALDYW

SEQ ID NO: 53590 - protein, 27 aa, Homo sapiens
CARKNDIGVEPVVPRLTMNYYLYMDVW

SEQ ID NO: 53591 - protein, 23 aa, Homo sapiens
CARGYWARITMVQGVVLHAFDIW

SEQ ID NO: 53592 - protein, 15 aa, Homo sapiens
CAKDNLPSGELIDYW

SEQ ID NO: 53593 - protein, 19 aa, Homo sapiens
CAKTNQDLSSSWYLWFDPW

SEQ ID NO: 53594 - protein, 14 aa, Homo sapiens
CASLAAAERAFDYW

SEQ ID NO: 53595 - protein, 12 aa, Homo sapiens
CHVSELLSTDYW

SEQ ID NO: 53596 - protein, 20 aa, Homo sapiens
CATTAPYCSSTSCHGWFDPW

SEQ ID NO: 53597 - protein, 16 aa, Homo sapiens
CAKCPWIQLWLIFDYW

SEQ ID NO: 53598 - protein, 19 aa, Homo sapiens
CASGYRSGSYYTKRYFDYW

SEQ ID NO: 53599 - protein, 16 aa, Homo sapiens
CARALEMATIGYAGYW

SEQ ID NO: 53600 - protein, 23 aa, Homo sapiens
CARIPAIFGVGHNYYYYYGMDVW

SEQ ID NO: 53601 - protein, 23 aa, Homo sapiens
CARVESEYYDFWSGLLGGWFDPW

SEQ ID NO: 53602 - protein, 18 aa, Homo sapiens
CALGPAGYGGNYYYFDLW

SEQ ID NO: 53603 - protein, 16 aa, Homo sapiens
CARTKQWLVHADFDYW

SEQ ID NO: 53604 - protein, 22 aa, Homo sapiens
CARSAELWSGHSSTERYWFDPW

SEQ ID NO: 53605 - protein, 16 aa, Homo sapiens
CAREYTSSSGRAFDIW

SEQ ID NO: 53606 - protein, 19 aa, Homo sapiens
CARDGVGGGDGWLQTSDYW

SEQ ID NO: 53607 - protein, 21 aa, Homo sapiens
CARMTTVTTLHLYYYYGMDVW

SEQ ID NO: 53608 - protein, 12 aa, Homo sapiens
CGRSGPPPFDYW

SEQ ID NO: 53609 - protein, 30 aa, Homo sapiens
CAREGGQGSGSYYPAGTRVVRDYYYYMDVW

SEQ ID NO: 53610 - protein, 23 aa, Homo sapiens
CAREGAITIFGVVPIPGDAFDIW

SEQ ID NO: 53611 - protein, 18 aa, Homo sapiens
CARDLFFWGVAAAGPDYW

SEQ ID NO: 53612 - protein, 10 aa, Homo sapiens
CMEALQTPLF

SEQ ID NO: 53613 - protein, 12 aa, Homo sapiens
CTSGTVTISDYW

SEQ ID NO: 53614 - protein, 20 aa, Homo sapiens
CATGPPVKYSGYDFRWFDPW

SEQ ID NO: 53615 - protein, 19 aa, Homo sapiens
CAKLPDTGAELGYNYFDYW

SEQ ID NO: 53616 - protein, 18 aa, Homo sapiens
CARAAQEGGSRTSCFDYW

SEQ ID NO: 53617 - protein, 19 aa, Homo sapiens
CARDHTHSSGWPGRLFDYW

SEQ ID NO: 53618 - protein, 19 aa, Homo sapiens
CARDNDFWSGYYTPWFDPW

SEQ ID NO: 53619 - protein, 21 aa, Homo sapiens
CARMAPLYDSSGYYLYAFDIW

SEQ ID NO: 53620 - protein, 19 aa, Homo sapiens
CARDLGYDILTDEVWFDPW

SEQ ID NO: 53621 - protein, 17 aa, Homo sapiens
CARAVAGTHPHDAFDIW

SEQ ID NO: 53622 - protein, 21 aa, Homo sapiens
CARTGTSSGWYDDYYYYMDVW

SEQ ID NO: 53623 - protein, 25 aa, Homo sapiens
CARDGLHIVVVPAAKSYYYYGMDVW

SEQ ID NO: 53624 - protein, 12 aa, Homo sapiens
CAREVQDWFESW

SEQ ID NO: 53625 - protein, 16 aa, Homo sapiens
CATDPGLGDGYNYDYW

SEQ ID NO: 53626 - protein, 19 aa, Homo sapiens
CARRAMIVVVLGVGAFDIW

SEQ ID NO: 53627 - protein, 18 aa, Homo sapiens
CAHGVYYYGSGSYYFDFW

SEQ ID NO: 53628 - protein, 21 aa, Homo sapiens
CARGSAWCTRSTCTYNWFDPW

SEQ ID NO: 53629 - protein, 21 aa, Homo sapiens
CARDKDGLMVVVPATSPFTYW

SEQ ID NO: 53630 - protein, 16 aa, Homo sapiens
CAKSQDGGYSSPFDPW

SEQ ID NO: 53631 - protein, 18 aa, Homo sapiens
CARFGDYGEPFYDYFDYW

SEQ ID NO: 53632 - protein, 19 aa, Homo sapiens
CARELHDSSGYYYNYFDYW

SEQ ID NO: 53633 - protein, 22 aa, Homo sapiens
CAKHNNYDYWSGSATGYYFDQW

SEQ ID NO: 53634 - protein, 16 aa, Homo sapiens
CARDFVVGGSYYFDYW

SEQ ID NO: 53635 - protein, 21 aa, Homo sapiens
CAKDSTNYDFWTGYLDYMDVW

SEQ ID NO: 53636 - protein, 16 aa, Homo sapiens
CARDPWELPSGAFDIW

SEQ ID NO: 53637 - protein, 16 aa, Homo sapiens
CARASSSWYGLEHDYW

SEQ ID NO: 53638 - protein, 15 aa, Homo sapiens
CARNIVKSHPAFDSW

SEQ ID NO: 53639 - protein, 15 aa, Homo sapiens
CARQKYLDLPLFDYW

SEQ ID NO: 53640 - protein, 18 aa, Homo sapiens
CARLYYDFDPGAYYMDVW

SEQ ID NO: 53641 - protein, 15 aa, Homo sapiens
CAKIDLQYGSTGDYW

SEQ ID NO: 53642 - protein, 20 aa, Homo sapiens
CATYCSSTSCLASDYYMDVW

SEQ ID NO: 53643 - protein, 24 aa, Homo sapiens
CAKEGPYFSDGSGGYHYHYYMDVW

SEQ ID NO: 53644 - protein, 23 aa, Homo sapiens
CARIRYNWNDLTRIYYYYYMDVW

SEQ ID NO: 53645 - protein, 14 aa, Homo sapiens
CATFYGDYSVVDYW

SEQ ID NO: 53646 - protein, 18 aa, Homo sapiens
CAHSYNYGSGSYEYFHRW

SEQ ID NO: 53647 - protein, 16 aa, Homo sapiens
CARSSGDYVLYWFDPW

SEQ ID NO: 53648 - protein, 17 aa, Homo sapiens
CARDHSYDYGDLDFDYW

SEQ ID NO: 53649 - protein, 16 aa, Homo sapiens
CARGEIAVAGIDFDYW

SEQ ID NO: 53650 - protein, 21 aa, Homo sapiens
CARDPGRSGYYLNDGYYFDYW

SEQ ID NO: 53651 - protein, 18 aa, Homo sapiens
CARDFNNDFSSDTAFDYW

SEQ ID NO: 53652 - protein, 14 aa, Homo sapiens
CVRGSSDWKGQDYW

SEQ ID NO: 53653 - protein, 27 aa, Homo sapiens
CAREISGYYDYIWGSYRSYYYYYMDVW

SEQ ID NO: 53654 - protein, 21 aa, Homo sapiens
CAREQRITIFGVVISVWFDPW

SEQ ID NO: 53655 - protein, 20 aa, Homo sapiens
CARHHPVLAARPQESSFDYW

SEQ ID NO: 53656 - protein, 26 aa, Homo sapiens
CAKSPHSITIFGVVTQGDYYYGMDVW

SEQ ID NO: 53657 - protein, 17 aa, Homo sapiens
CARHGSSGWGDDAFDIW

SEQ ID NO: 53658 - protein, 15 aa, Homo sapiens
CATGYSSGWDNFDYW

SEQ ID NO: 53659 - protein, 17 aa, Homo sapiens
CAHERISGYDLRYFDLW

SEQ ID NO: 53660 - protein, 21 aa, Homo sapiens
CTRDLDYYDSSGYYPTCFDYW

SEQ ID NO: 53661 - protein, 26 aa, Homo sapiens
CARDPKPERRRINSSSWVSLDAFDIW

SEQ ID NO: 53662 - protein, 15 aa, Homo sapiens
CAHRWGFYKGWFDPW

SEQ ID NO: 53663 - protein, 17 aa, Homo sapiens
CARHDSNNWNYNAFDIW

SEQ ID NO: 53664 - protein, 18 aa, Homo sapiens
CARGPSYYYGSGRPLDYW

SEQ ID NO: 53665 - protein, 17 aa, Homo sapiens
CATTGATDIVATILDYW

SEQ ID NO: 53666 - protein, 17 aa, Homo sapiens
CAHRRMVPLPNNWFDPW

SEQ ID NO: 53667 - protein, 22 aa, Homo sapiens
CARGGGLHDQFDDYAYRTFDFW

SEQ ID NO: 53668 - protein, 21 aa, Homo sapiens
CARGYCTGGVCYFGEYYFDYW

SEQ ID NO: 53669 - protein, 18 aa, Homo sapiens
CARHAHSSSWSGGPIDYW

SEQ ID NO: 53670 - protein, 17 aa, Homo sapiens
CAREAGHRDGYNLFDYW

SEQ ID NO: 53671 - protein, 27 aa, Homo sapiens
CARDPVSYYDFWSGYIEHYYYYGMDVW

SEQ ID NO: 53672 - protein, 19 aa, Homo sapiens
CARLLDDNWNYEESWFDPW

SEQ ID NO: 53673 - protein, 15 aa, Homo sapiens
CARDQPVYYGWFDPW

SEQ ID NO: 53674 - protein, 19 aa, Homo sapiens
CARGRREQLLRGSDAFDIW

SEQ ID NO: 53675 - protein, 22 aa, Homo sapiens
CARGSLNYYDSSGYRLHWFDPW

SEQ ID NO: 53676 - protein, 25 aa, Homo sapiens
CASSPLGYCSSTSCYLTGTTALDYW

SEQ ID NO: 53677 - protein, 20 aa, Homo sapiens
CARTPPLAAAGHEAYYFDYW

SEQ ID NO: 53678 - protein, 18 aa, Homo sapiens
CASPYNWNYVSLSAFDIW

SEQ ID NO: 53679 - protein, 23 aa, Homo sapiens
CARETYYDFWSGPYGNYYYMDVW

SEQ ID NO: 53680 - protein, 18 aa, Homo sapiens
CARAGWGSVTAYNWFDPW

SEQ ID NO: 53681 - protein, 18 aa, Homo sapiens
CAYASGGNGWDSRWFDPW

SEQ ID NO: 53682 - protein, 16 aa, Homo sapiens
CASSSGYSGYEHFDYW

SEQ ID NO: 53683 - protein, 23 aa, Homo sapiens
CARLDCSNTGCHPPVRGDWYDPW

SEQ ID NO: 53684 - protein, 16 aa, Homo sapiens
CARDLRLGDYEPFDYW

SEQ ID NO: 53685 - protein, 23 aa, Homo sapiens
CARHQSPVFYYDSSGYSDSFDPW

SEQ ID NO: 53686 - protein, 17 aa, Homo sapiens
CARDHAFSSGYHTGDYW

SEQ ID NO: 53687 - protein, 17 aa, Homo sapiens
CARDGGYGDYEGVFDYW

SEQ ID NO: 53688 - protein, 20 aa, Homo sapiens
CARDPTVTSGSFYYYYMDVW

SEQ ID NO: 53689 - protein, 16 aa, Homo sapiens
CARHVGAAAVDLFDYW

SEQ ID NO: 53690 - protein, 15 aa, Homo sapiens
CGSWDSSLSTGSYVF

SEQ ID NO: 53691 - protein, 17 aa, Homo sapiens
CAREITIFGVSNWFDPW

SEQ ID NO: 53692 - protein, 18 aa, Homo sapiens
CAKAPYDYGDYDWYFDLW

SEQ ID NO: 53693 - protein, 22 aa, Homo sapiens
CARHCVLRYFDWLFRIDYFDYW

SEQ ID NO: 53694 - protein, 17 aa, Homo sapiens
CARHYSRYSGYDAIDYW

SEQ ID NO: 53695 - protein, 26 aa, Homo sapiens
CARDLSLSYYGSGSQSGTYYYGMDVW

SEQ ID NO: 53696 - protein, 20 aa, Homo sapiens
CARDNRFVVVPANDWYFDLW

SEQ ID NO: 53697 - protein, 19 aa, Homo sapiens
CARDAPPVNWNDGEELDYW

SEQ ID NO: 53698 - protein, 18 aa, Homo sapiens
CARDSASSSGWTATLDYW

SEQ ID NO: 53699 - protein, 14 aa, Homo sapiens
CATWGNYYLPLDYW

SEQ ID NO: 53700 - protein, 20 aa, Homo sapiens
CARVEGFLEWTNYYYYMDVW

SEQ ID NO: 53701 - protein, 17 aa, Homo sapiens
CARHNEYQLLSNWFDPW

SEQ ID NO: 53702 - protein, 14 aa, Homo sapiens
CARTGPFWPHFDYW

SEQ ID NO: 53703 - protein, 23 aa, Homo sapiens
CARVGHGYGDNFNYYYYYYMDVW

SEQ ID NO: 53704 - protein, 20 aa, Homo sapiens
CARGGEYYDFWSGYYETDYW

SEQ ID NO: 53705 - protein, 11 aa, Homo sapiens
CQLYNSYVYIF

SEQ ID NO: 53706 - protein, 23 aa, Homo sapiens
CARYYYDSSGYYYGHYYYGMDVW

SEQ ID NO: 53707 - protein, 21 aa, Homo sapiens
CARPLERIYYDSRGYWYFDLW

SEQ ID NO: 53708 - protein, 13 aa, Homo sapiens
CASYTSEDAFDIW

SEQ ID NO: 53709 - protein, 14 aa, Homo sapiens
CASGYDSSGYPGYW

SEQ ID NO: 53710 - protein, 26 aa, Homo sapiens
CARTGWARGVGATPVPYYYYYGMDVW

SEQ ID NO: 53711 - protein, 29 aa, Homo sapiens
CARDLGDYDFWSGWSFGGVIVKAGGFDYW

SEQ ID NO: 53712 - protein, 21 aa, Homo sapiens
CASTLGYCSGGSCYHDAFDIW

SEQ ID NO: 53713 - protein, 11 aa, Homo sapiens
CAKDMDGMDVW

SEQ ID NO: 53714 - protein, 19 aa, Homo sapiens
CARVPPDDSSGYYYAFDYW

SEQ ID NO: 53715 - protein, 13 aa, Homo sapiens
CARVMGDYGDDYW

SEQ ID NO: 53716 - protein, 15 aa, Homo sapiens
CAREMITSYGEFDYW

SEQ ID NO: 53717 - protein, 21 aa, Homo sapiens
CAPDTKEYYYDSSGYHIFDPW

SEQ ID NO: 53718 - protein, 17 aa, Homo sapiens
CARDNYGGTGSGAFDIW

SEQ ID NO: 53719 - protein, 22 aa, Homo sapiens
CATDDSGVTTLAPPYYDALGVW

SEQ ID NO: 53720 - protein, 17 aa, Homo sapiens
CARGVATIDQTYYLDYW

SEQ ID NO: 53721 - protein, 19 aa, Homo sapiens
CASDLFGYYGSGTYVDDYW

SEQ ID NO: 53722 - protein, 21 aa, Homo sapiens
CARAGGHYTAMVTSISWFDPW

SEQ ID NO: 53723 - protein, 19 aa, Homo sapiens
CAREGKFWGSYRTYYFDYW

SEQ ID NO: 53724 - protein, 17 aa, Homo sapiens
CAKDSSIVLVVYAPDYW

SEQ ID NO: 53725 - protein, 12 aa, Homo sapiens
CSSYKSSNIVLF

SEQ ID NO: 53726 - protein, 18 aa, Homo sapiens
CAREAPVSYDSSGSLDYW

SEQ ID NO: 53727 - protein, 18 aa, Homo sapiens
CARGLEHYYDSEVTFDLW

SEQ ID NO: 53728 - protein, 18 aa, Homo sapiens
CAKDRTVVVVAATRIDYW

SEQ ID NO: 53729 - protein, 16 aa, Homo sapiens
CTRSQCTGGCYPFDSW

SEQ ID NO: 53730 - protein, 18 aa, Homo sapiens
CARDHGVDIVATPPFDYW

SEQ ID NO: 53731 - protein, 19 aa, Homo sapiens
CVRSELEPGYYYYYYMDVW

SEQ ID NO: 53732 - protein, 19 aa, Homo sapiens
CARDPGRHFILTSPDFDYW

SEQ ID NO: 53733 - protein, 24 aa, Homo sapiens
CAREVMITFGGVIAYGTGGYFDYW

SEQ ID NO: 53734 - protein, 20 aa, Homo sapiens
CARLSIVVVVAATEWSFDYW

SEQ ID NO: 53735 - protein, 26 aa, Homo sapiens
CARDAAIVVVPAALFQIDYYYYMDVW

SEQ ID NO: 53736 - protein, 18 aa, Homo sapiens
CARQSIVGNGALGAFDIW

SEQ ID NO: 53737 - protein, 25 aa, Homo sapiens
CARATSYYYDSSGYYYVGSLAPDYW

SEQ ID NO: 53738 - protein, 14 aa, Homo sapiens
CASSSSVVGWFDPW

SEQ ID NO: 53739 - protein, 18 aa, Homo sapiens
CATASPVVVAAIGWFDPW

SEQ ID NO: 53740 - protein, 15 aa, Homo sapiens
CARLIAWGAHWFDPW

SEQ ID NO: 53741 - protein, 16 aa, Homo sapiens
CARETSVWFRENIDYW

SEQ ID NO: 53742 - protein, 25 aa, Homo sapiens
CAREDFITMVQGVMFDYYYYGMDVW

SEQ ID NO: 53743 - protein, 15 aa, Homo sapiens
CARIDAWNYMSFDYW

SEQ ID NO: 53744 - protein, 18 aa, Homo sapiens
CARMVEGTAVAGTGFDYW

SEQ ID NO: 53745 - protein, 18 aa, Homo sapiens
CAHGAESIVGADTYFDYW

SEQ ID NO: 53746 - protein, 23 aa, Homo sapiens
CARDGGSGGNSRGDNYYYGMDVW

SEQ ID NO: 53747 - protein, 17 aa, Homo sapiens
CARGYSSSWDNNWFDPW

SEQ ID NO: 53748 - protein, 30 aa, Homo sapiens
CARRSEHTAVFGVVTMPITESTYYYGMDVW

SEQ ID NO: 53749 - protein, 21 aa, Homo sapiens
CASQLPLVDDYGDYLFAFDIW

SEQ ID NO: 53750 - protein, 16 aa, Homo sapiens
CARDFSYSSSSLLDYW

SEQ ID NO: 53751 - protein, 20 aa, Homo sapiens
CASYRDSSGYYYSGDAFDIW

SEQ ID NO: 53752 - protein, 24 aa, Homo sapiens
CAKDRALVVPAGMRYYYYYGMDVW

SEQ ID NO: 53753 - protein, 19 aa, Homo sapiens
CARDQVVSNWNDVGWFDPW

SEQ ID NO: 53754 - protein, 23 aa, Homo sapiens
CARDPTFTVTTHPLDYYYGMDVW

SEQ ID NO: 53755 - protein, 22 aa, Homo sapiens
CATDLWQEGSSIAAPPDWFDPW

SEQ ID NO: 53756 - protein, 16 aa, Homo sapiens
CASAYYKGLTSPFDYW

SEQ ID NO: 53757 - protein, 19 aa, Homo sapiens
CARFTSIDDYGDSDNFDYW

SEQ ID NO: 53758 - protein, 20 aa, Homo sapiens
CARDLKYCSGGSCTGYFDYW

SEQ ID NO: 53759 - protein, 19 aa, Homo sapiens
CARDPPTSTMIEQDAFDIW

SEQ ID NO: 53760 - protein, 22 aa, Homo sapiens
CARGGWNYPARDYYYYYGMDVW

SEQ ID NO: 53761 - protein, 18 aa, Homo sapiens
CATYLPTVLTNTWSGDYW

SEQ ID NO: 53762 - protein, 16 aa, Homo sapiens
CAHRRVAAFYRGFDPW

SEQ ID NO: 53763 - protein, 16 aa, Homo sapiens
CARAGFGSGSFGVDYW

SEQ ID NO: 53764 - protein, 20 aa, Homo sapiens
CARDLNIVVVPAASPWFDPW

SEQ ID NO: 53765 - protein, 21 aa, Homo sapiens
CARDHPSMVATYYYYYYMDVW

SEQ ID NO: 53766 - protein, 17 aa, Homo sapiens
CAKTVSVFGSPARHDYW

SEQ ID NO: 53767 - protein, 23 aa, Homo sapiens
CARIQAHPLDDFWSGYYYYFDYW

SEQ ID NO: 53768 - protein, 21 aa, Homo sapiens
CATLVAAQEEYSSGPTVADYW

SEQ ID NO: 53769 - protein, 18 aa, Homo sapiens
CARQRRIAAVGPGEFDSW

SEQ ID NO: 53770 - protein, 19 aa, Homo sapiens
CARDLTPNYGSGKGWFDPW

SEQ ID NO: 53771 - protein, 23 aa, Homo sapiens
CARHNLTPITIVGATPGRWFDPW

SEQ ID NO: 53772 - protein, 19 aa, Homo sapiens
CARDFGGYDRSPYNWFDPW

SEQ ID NO: 53773 - protein, 16 aa, Homo sapiens
CATYSNYNYYYYMDVW

SEQ ID NO: 53774 - protein, 15 aa, Homo sapiens
CASRSGWNVFHFDYW

SEQ ID NO: 53775 - protein, 20 aa, Homo sapiens
CVRDRGDRSHYYYYYGMDVW

SEQ ID NO: 53776 - protein, 17 aa, Homo sapiens
CAKAGAILEWLLVVDYW

SEQ ID NO: 53777 - protein, 22 aa, Homo sapiens
CARVHYYDSSGYNHLVYYFDYW

SEQ ID NO: 53778 - protein, 16 aa, Homo sapiens
CARDIMGANYFYFDYW

SEQ ID NO: 53779 - protein, 13 aa, Homo sapiens
CATTMGHTAFDYW

SEQ ID NO: 53780 - protein, 19 aa, Homo sapiens
CATSTVTTVTPREDWFDPW

SEQ ID NO: 53781 - protein, 24 aa, Homo sapiens
CAKETPYCSGGSCSRYYYYGMDVW

SEQ ID NO: 53782 - protein, 21 aa, Homo sapiens
CARVPRYSGYDAYYYYGMDVW

SEQ ID NO: 53783 - protein, 14 aa, Homo sapiens
CARGMNWQDPFDIW

SEQ ID NO: 53784 - protein, 17 aa, Homo sapiens
CAKDYSGWRFPDGFEIW

SEQ ID NO: 53785 - protein, 19 aa, Homo sapiens
CARRTGGYSGYDSFVEDYW

SEQ ID NO: 53786 - protein, 13 aa, Homo sapiens
CARDLRNSGLDYW

SEQ ID NO: 53787 - protein, 18 aa, Homo sapiens
CARNYYVSGKLYAWFDPW

SEQ ID NO: 53788 - protein, 23 aa, Homo sapiens
CAADRYDILTGYYWGVNNWFDPW

SEQ ID NO: 53789 - protein, 18 aa, Homo sapiens
CATFPAVFGRGGRWFDPW

SEQ ID NO: 53790 - protein, 20 aa, Homo sapiens
CARVAAGMTYYDFWSGPDYW

SEQ ID NO: 53791 - protein, 22 aa, Homo sapiens
CARGDLRGLLGYDGNYGWVDYW

SEQ ID NO: 53792 - protein, 20 aa, Homo sapiens
CARVGVIADQRHSHNWFDPW

SEQ ID NO: 53793 - protein, 18 aa, Homo sapiens
CARVSKGADSGHYYPDHW

SEQ ID NO: 53794 - protein, 23 aa, Homo sapiens
CAREERNYDFWSGYYGTYGMDVW

SEQ ID NO: 53795 - protein, 23 aa, Homo sapiens
CARDPIYYYGSGSHPIGDGMDVW

SEQ ID NO: 53796 - protein, 26 aa, Homo sapiens
CARDRGWYYDYIWGSYRYTGAWFDPW

SEQ ID NO: 53797 - protein, 21 aa, Homo sapiens
CAKLLQDFWSGYDYYYGMDVW

SEQ ID NO: 53798 - protein, 26 aa, Homo sapiens
CARSHYDYIWGSYRQDENYYYYMDVW

SEQ ID NO: 53799 - protein, 18 aa, Homo sapiens
CARSLETGDLPFWYFDLW

SEQ ID NO: 53800 - protein, 15 aa, Homo sapiens
CARPPPGFGNAFEVW

SEQ ID NO: 53801 - protein, 20 aa, Homo sapiens
CARVYGLVSSWYVHYYMDVW

SEQ ID NO: 53802 - protein, 24 aa, Homo sapiens
CARVPEEEYCTGGVCYAAEYFQHW

SEQ ID NO: 53803 - protein, 19 aa, Homo sapiens
CARPRGNYYDSSDGAFDYW

SEQ ID NO: 53804 - protein, 23 aa, Homo sapiens
CARGPYSSSYPGDDYYYYGMDVW

SEQ ID NO: 53805 - protein, 18 aa, Homo sapiens
CAPVLAQLLLYEWGFDPW

SEQ ID NO: 53806 - protein, 19 aa, Homo sapiens
CASLSYYDSSGYPDGGDYW

SEQ ID NO: 53807 - protein, 17 aa, Homo sapiens
CARVGLFCTSTNCFDSW

SEQ ID NO: 53808 - protein, 18 aa, Homo sapiens
CAHGTYCGGDCYGGLDYW

SEQ ID NO: 53809 - protein, 20 aa, Homo sapiens
CARGTRGLWFRELGIRFDPW

SEQ ID NO: 53810 - protein, 16 aa, Homo sapiens
CARINYNDFTWRFDHW

SEQ ID NO: 53811 - protein, 24 aa, Homo sapiens
CARHSETDSGSYYARHYYYGMDVW

SEQ ID NO: 53812 - protein, 25 aa, Homo sapiens
CARDRSMGYCSGGSCYFADDAFDIW

SEQ ID NO: 53813 - protein, 21 aa, Homo sapiens
CARSSGYYNGVWYYYYYMDVW

SEQ ID NO: 53814 - protein, 15 aa, Homo sapiens
CATGVAARLNWFDSW

SEQ ID NO: 53815 - protein, 16 aa, Homo sapiens
CARLTYDSGTYAFDIW

SEQ ID NO: 53816 - protein, 17 aa, Homo sapiens
CARARDDYSNPNWFDPW

SEQ ID NO: 53817 - protein, 18 aa, Homo sapiens
CARTDLNRYNYKFYFDYW

SEQ ID NO: 53818 - protein, 20 aa, Homo sapiens
CAGEYSSSLDYYYYYGMDVW

SEQ ID NO: 53819 - protein, 22 aa, Homo sapiens
CARGTTVTTFWGDVYYYGMDVW

SEQ ID NO: 53820 - protein, 19 aa, Homo sapiens
CARHPVRITIFEGPGVDYW

SEQ ID NO: 53821 - protein, 16 aa, Homo sapiens
CAREIEIQASYYFDFW

SEQ ID NO: 53822 - protein, 17 aa, Homo sapiens
CARSEVSVGATTEFDYW

SEQ ID NO: 53823 - protein, 22 aa, Homo sapiens
CARSPLVDYYDSSGYQYYFDYW

SEQ ID NO: 53824 - protein, 23 aa, Homo sapiens
CAKGEYYDILTGLTLYYYGMDVW

SEQ ID NO: 53825 - protein, 17 aa, Homo sapiens
CARDHVDRQYYYYMDVW

SEQ ID NO: 53826 - protein, 20 aa, Homo sapiens
CARDPTQPHQGDYYYGMDVW

SEQ ID NO: 53827 - protein, 24 aa, Homo sapiens
CARATGGYYYDSSGYYYQGPFDLW

SEQ ID NO: 53828 - protein, 18 aa, Homo sapiens
CARQRLYGGNSRDAFDIW

SEQ ID NO: 53829 - protein, 22 aa, Homo sapiens
CARSTYYDFWSGYAYYYYMDVW

SEQ ID NO: 53830 - protein, 24 aa, Homo sapiens
CARTNYYYYDSSVILGRGSEFDYW

SEQ ID NO: 53831 - protein, 15 aa, Homo sapiens
CARDQLEENDAFDIW

SEQ ID NO: 53832 - protein, 17 aa, Homo sapiens
CVCGLYGSGSYSYMDVW

SEQ ID NO: 53833 - protein, 17 aa, Homo sapiens
CARDFAIAVAGHDIDYW

SEQ ID NO: 53834 - protein, 23 aa, Homo sapiens
CASLYGDYLSGLFPYYYYGMDVW

SEQ ID NO: 53835 - protein, 19 aa, Homo sapiens
CARDLFWGSYEDSQGTDYW

SEQ ID NO: 53836 - protein, 23 aa, Homo sapiens
CARVRVLNDYIWGSYRYDHFDYW

SEQ ID NO: 53837 - protein, 13 aa, Homo sapiens
CVRDSRDYYEDYW

SEQ ID NO: 53838 - protein, 22 aa, Homo sapiens
CARLNLWGQLPLPVYYYGMDVW

SEQ ID NO: 53839 - protein, 16 aa, Homo sapiens
CARGPDDYGDPRFDYW

SEQ ID NO: 53840 - protein, 15 aa, Homo sapiens
CAKGEGYLRELFSYW

SEQ ID NO: 53841 - protein, 15 aa, Homo sapiens
CARTITTVVRAFDFW

SEQ ID NO: 53842 - protein, 13 aa, Homo sapiens
CAHRRTIYTYDYW

SEQ ID NO: 53843 - protein, 20 aa, Homo sapiens
CARALREPLFGGVYYYFDYW

SEQ ID NO: 53844 - protein, 17 aa, Homo sapiens
CARDITGTASGGYFDYW

SEQ ID NO: 53845 - protein, 12 aa, Homo sapiens
CQRYGDSPQWTF

SEQ ID NO: 53846 - protein, 21 aa, Homo sapiens
CARDASPTWRYSGSYYYFDYW

SEQ ID NO: 53847 - protein, 14 aa, Homo sapiens
CARHASDLSYMDVW

SEQ ID NO: 53848 - protein, 20 aa, Homo sapiens
CVRGPPYYDFWSGYYYFDYW

SEQ ID NO: 53849 - protein, 23 aa, Homo sapiens
CARDMTGYCSGGSCYPPVYMDVW

SEQ ID NO: 53850 - protein, 15 aa, Homo sapiens
CASSIEMATIPFDYW

SEQ ID NO: 53851 - protein, 22 aa, Homo sapiens
CARTNCSGGSCYHAGDYYFDYW

SEQ ID NO: 53852 - protein, 23 aa, Homo sapiens
CAKLGGYDPITGPTTVEWAFDIW

SEQ ID NO: 53853 - protein, 27 aa, Homo sapiens
CARAPKENYDILTGYYLYYYYYGMDVW

SEQ ID NO: 53854 - protein, 14 aa, Homo sapiens
CARHDTSGWYVDSW

SEQ ID NO: 53855 - protein, 17 aa, Homo sapiens
CASPRTVGMATTHFDYW

SEQ ID NO: 53856 - protein, 25 aa, Homo sapiens
CARLTEYYYDSSGYYSFHDGWFDPW

SEQ ID NO: 53857 - protein, 18 aa, Homo sapiens
CARLNGDFDWLLYFFDYW

SEQ ID NO: 53858 - protein, 24 aa, Homo sapiens
CTRAQQRYFDWLLRSDYYYYMDVW

SEQ ID NO: 53859 - protein, 24 aa, Homo sapiens
CARVPSDYGDWEQAAWAAYYFDYW

SEQ ID NO: 53860 - protein, 19 aa, Homo sapiens
CTRDYGDYVDYYYYGMDVW

SEQ ID NO: 53861 - protein, 25 aa, Homo sapiens
CARAQNLGAAAGSRAPQRERYFDLW

SEQ ID NO: 53862 - protein, 15 aa, Homo sapiens
CATEPGISSWYLDHW

SEQ ID NO: 53863 - protein, 21 aa, Homo sapiens
CAREGQQLVRLRYYYYGMDVW

SEQ ID NO: 53864 - protein, 25 aa, Homo sapiens
CARDLREYYYDSSGYSLGADWFDPW

SEQ ID NO: 53865 - protein, 24 aa, Homo sapiens
CARLVGTEVVPAAIGYYYYYMDVW

SEQ ID NO: 53866 - protein, 21 aa, Homo sapiens
CARDLAFSGSYDSQTDAFDIW

SEQ ID NO: 53867 - protein, 22 aa, Homo sapiens
CAREPDEYSSSSFYYYYYMDVW

SEQ ID NO: 53868 - protein, 16 aa, Homo sapiens
CTTREWDLLRLAFDIW

SEQ ID NO: 53869 - protein, 19 aa, Homo sapiens
CAKFGATMVQGVIITADYW

SEQ ID NO: 53870 - protein, 16 aa, Homo sapiens
CARRGYSSGWHGPDYW

SEQ ID NO: 53871 - protein, 14 aa, Homo sapiens
CATTVTPLDPFDYW

SEQ ID NO: 53872 - protein, 19 aa, Homo sapiens
CSRVGWSYSRFYYYYMDVW

SEQ ID NO: 53873 - protein, 20 aa, Homo sapiens
CAKGAGFPLYSGYVDWFDPW

SEQ ID NO: 53874 - protein, 16 aa, Homo sapiens
CAKVRGSDHYYYMDVW

SEQ ID NO: 53875 - protein, 19 aa, Homo sapiens
CAKDINVGNYGSGNVIDYW

SEQ ID NO: 53876 - protein, 18 aa, Homo sapiens
CARDPEFTFSSSWTFDYW

SEQ ID NO: 53877 - protein, 18 aa, Homo sapiens
CATQFAIRSGYYYDFDYW

SEQ ID NO: 53878 - protein, 16 aa, Homo sapiens
CARDGEQLWLLNFDYW

SEQ ID NO: 53879 - protein, 27 aa, Homo sapiens
CARANEKVDIVATGLFGGHANWYFDLW

SEQ ID NO: 53880 - protein, 17 aa, Homo sapiens
CATLPLGGYDPHYMDVW

SEQ ID NO: 53881 - protein, 21 aa, Homo sapiens
CTTDHEGYYMADYYYYYMDVW

SEQ ID NO: 53882 - protein, 19 aa, Homo sapiens
CARPQSQYDGPGYYYMDVW

SEQ ID NO: 53883 - protein, 16 aa, Homo sapiens
CARAAGGSYRRAFDIW

SEQ ID NO: 53884 - protein, 21 aa, Homo sapiens
CARGPLWFRELLSYYYYMDVW

SEQ ID NO: 53885 - protein, 18 aa, Homo sapiens
CAVVPSGYENYYYYMDVW

SEQ ID NO: 53886 - protein, 17 aa, Homo sapiens
CVRVTMLQGEFDAFDIW

SEQ ID NO: 53887 - protein, 22 aa, Homo sapiens
CARTPYYDFWSGYYTAYWFDPW

SEQ ID NO: 53888 - protein, 30 aa, Homo sapiens
CAKDQAYYDILTGYLPGPHWHSYYYGMDVW

SEQ ID NO: 53889 - protein, 19 aa, Homo sapiens
CAREGSDFTSGWTDWFDPW

SEQ ID NO: 53890 - protein, 20 aa, Homo sapiens
CASPNDGYCSGANCYYFDYW

SEQ ID NO: 53891 - protein, 17 aa, Homo sapiens
CAKEYSGYDWGGAFDYW

SEQ ID NO: 53892 - protein, 19 aa, Homo sapiens
CARIWDSSGYSYTGAFDIW

SEQ ID NO: 53893 - protein, 18 aa, Homo sapiens
CARDVPAVPTPDDAFDIW

SEQ ID NO: 53894 - protein, 19 aa, Homo sapiens
CARAGWGDYASHTYYFDYW

SEQ ID NO: 53895 - protein, 18 aa, Homo sapiens
CAREQLDDLVLEWPVDYW

SEQ ID NO: 53896 - protein, 13 aa, Homo sapiens
CVRRSMVQGFDYW

SEQ ID NO: 53897 - protein, 17 aa, Homo sapiens
CGRLRMLVIYATDFDSW

SEQ ID NO: 53898 - protein, 18 aa, Homo sapiens
CARAPRSGELHMVWFDPW

SEQ ID NO: 53899 - protein, 20 aa, Homo sapiens
CAKADYYYDSSGPNGGFDYW

SEQ ID NO: 53900 - protein, 24 aa, Homo sapiens
CARHLRQCSGGICQTDYYYAMDVW

SEQ ID NO: 53901 - protein, 20 aa, Homo sapiens
CARVGITMVQGVIHNWFDPW

SEQ ID NO: 53902 - protein, 22 aa, Homo sapiens
CARGDKRSNWNYNYYYYGMDVW

SEQ ID NO: 53903 - protein, 15 aa, Homo sapiens
CARQASTGGQNPDYW

SEQ ID NO: 53904 - protein, 15 aa, Homo sapiens
CARAYSSNYNPFDPW

SEQ ID NO: 53905 - protein, 18 aa, Homo sapiens
CARDPDPGAVAGGEFDYW

SEQ ID NO: 53906 - protein, 15 aa, Homo sapiens
CARTLPAASGVGDYW

SEQ ID NO: 53907 - protein, 20 aa, Homo sapiens
CAKDLAPYGDYDYYYGMDVW

SEQ ID NO: 53908 - protein, 21 aa, Homo sapiens
CASSGRNIVVVPAAKRLYDYW

SEQ ID NO: 53909 - protein, 24 aa, Homo sapiens
CARDTLPLDSSSWYSHYYYGMDVW

SEQ ID NO: 53910 - protein, 14 aa, Homo sapiens
CAREDTTMVGYDYW

SEQ ID NO: 53911 - protein, 25 aa, Homo sapiens
CAREPNPRTIFGVVITGTYYYFDYW

SEQ ID NO: 53912 - protein, 16 aa, Homo sapiens
CARDVCSGGYCYFDEW

SEQ ID NO: 53913 - protein, 23 aa, Homo sapiens
CARDAYYDFWSAFNDYYYGMDVW

SEQ ID NO: 53914 - protein, 20 aa, Homo sapiens
CAREKLENGLRYYYYYMDVW

SEQ ID NO: 53915 - protein, 13 aa, Homo sapiens
CTRDRWELPNDYW

SEQ ID NO: 53916 - protein, 16 aa, Homo sapiens
CVKECCSGSDPLYDYW

SEQ ID NO: 53917 - protein, 18 aa, Homo sapiens
CARGYDYIWGSTSRFGYW

SEQ ID NO: 53918 - protein, 19 aa, Homo sapiens
CAKDRVRYFDWLLDYFDYW

SEQ ID NO: 53919 - protein, 18 aa, Homo sapiens
CATYPGIAVAGYYYMDVW

SEQ ID NO: 53920 - protein, 16 aa, Homo sapiens
CATDYAVAVAGTLDYW

SEQ ID NO: 53921 - protein, 22 aa, Homo sapiens
CARDGGYDFWSGHTSNNWFDPW

SEQ ID NO: 53922 - protein, 17 aa, Homo sapiens
CARDQINWGDDYYFDYW

SEQ ID NO: 53923 - protein, 24 aa, Homo sapiens
CAREGSIAVAGLLLPTYYYYMDVW

SEQ ID NO: 53924 - protein, 15 aa, Homo sapiens
CAHTYYPSGRYFRIW

SEQ ID NO: 53925 - protein, 15 aa, Homo sapiens
CARSFDFSSSAVDYW

SEQ ID NO: 53926 - protein, 12 aa, Homo sapiens
CQSGDSHGSLLF

SEQ ID NO: 53927 - protein, 22 aa, Homo sapiens
CARGGWGTGTTFRSDYYYMDVW

SEQ ID NO: 53928 - protein, 20 aa, Homo sapiens
CARGSPTDYGDYLHREFDLW

SEQ ID NO: 53929 - protein, 14 aa, Homo sapiens
CAREERWDYYFDYW

SEQ ID NO: 53930 - protein, 19 aa, Homo sapiens
CAKTTWDYIWGSYLPPDYW

SEQ ID NO: 53931 - protein, 23 aa, Homo sapiens
CARVPDDYYDSSGYFGLGAFDIW

SEQ ID NO: 53932 - protein, 20 aa, Homo sapiens
CARESSITMIVEGVGAFDIW

SEQ ID NO: 53933 - protein, 19 aa, Homo sapiens
CARAAGYSSSWYPDRFDYW

SEQ ID NO: 53934 - protein, 15 aa, Homo sapiens
CAASSLGFPLPTDYW

SEQ ID NO: 53935 - protein, 19 aa, Homo sapiens
CARMYYDILTGYYEGFDPW

SEQ ID NO: 53936 - protein, 26 aa, Homo sapiens
CARDRSGYGVPNQKKYYYYYYGMDVW

SEQ ID NO: 53937 - protein, 13 aa, Homo sapiens
CAREVTTRETDYW

SEQ ID NO: 53938 - protein, 18 aa, Homo sapiens
CASPKRWEPGYAPAFDIW

SEQ ID NO: 53939 - protein, 12 aa, Homo sapiens
CARARPYYFDFW

SEQ ID NO: 53940 - protein, 18 aa, Homo sapiens
CARDLPSPLTTWSGFDYW

SEQ ID NO: 53941 - protein, 16 aa, Homo sapiens
CASYGGVAASREFDYW

SEQ ID NO: 53942 - protein, 15 aa, Homo sapiens
CARDFGAAEALSDYW

SEQ ID NO: 53943 - protein, 19 aa, Homo sapiens
CARDYYYGSGSYYPYFDYW

SEQ ID NO: 53944 - protein, 14 aa, Homo sapiens
CARQRYSRNAFDIW

SEQ ID NO: 53945 - protein, 30 aa, Homo sapiens
CAREREVDFWSGYYIVPHTQYYYYYGMDVW

SEQ ID NO: 53946 - protein, 18 aa, Homo sapiens
CARFITMVQGATKYFDYW

SEQ ID NO: 53947 - protein, 23 aa, Homo sapiens
CARDPYDFWSGYQIETNNWFDPW

SEQ ID NO: 53948 - protein, 18 aa, Homo sapiens
CAGKEGYSSSWYDAFDIW

SEQ ID NO: 53949 - protein, 25 aa, Homo sapiens
CARNPNCGGDCYDGGSDYYYYMDVW

SEQ ID NO: 53950 - protein, 22 aa, Homo sapiens
CASLDIVVVPAAKGPAWYFDLW

SEQ ID NO: 53951 - protein, 17 aa, Homo sapiens
CARDWRLNYGDYAFDYW

SEQ ID NO: 53952 - protein, 15 aa, Homo sapiens
CARDKGGAVAGLDYW

SEQ ID NO: 53953 - protein, 19 aa, Homo sapiens
CARGDLGPYGDYVPNFDYW

SEQ ID NO: 53954 - protein, 18 aa, Homo sapiens
CASSSYYESSPNPYFDSW

SEQ ID NO: 53955 - protein, 18 aa, Homo sapiens
CATYPWQYDYYYYGMDVW

SEQ ID NO: 53956 - protein, 16 aa, Homo sapiens
CARLYSSSSGKVLDYW

SEQ ID NO: 53957 - protein, 20 aa, Homo sapiens
CATIRWDWNYDSSEYYFDYW

SEQ ID NO: 53958 - protein, 19 aa, Homo sapiens
CARSLRDSSSWYGYYFDYW

SEQ ID NO: 53959 - protein, 14 aa, Homo sapiens
CARLSATRRVFDDW

SEQ ID NO: 53960 - protein, 14 aa, Homo sapiens
CSLYTSSSTSSWVF

SEQ ID NO: 53961 - protein, 21 aa, Homo sapiens
CARDGYYDSSGYYVEFLFDIW

SEQ ID NO: 53962 - protein, 17 aa, Homo sapiens
CATIPKSLVPVYTFDFW

SEQ ID NO: 53963 - protein, 28 aa, Homo sapiens
CARDFGAPYSGYDLLGSTPYYYYYMDVW

SEQ ID NO: 53964 - protein, 23 aa, Homo sapiens
CASVPPNYYGSGSYYKYDHFDYW

SEQ ID NO: 53965 - protein, 17 aa, Homo sapiens
CARIFRDEWELLPFDYW

SEQ ID NO: 53966 - protein, 23 aa, Homo sapiens
CARDYENSPLRFLEWSPGWFDPW

SEQ ID NO: 53967 - protein, 12 aa, Homo sapiens
CARIFIRWFDPW

SEQ ID NO: 53968 - protein, 18 aa, Homo sapiens
CAREGELHLGELSTFDYW

SEQ ID NO: 53969 - protein, 20 aa, Homo sapiens
CASGGTYYYDIFGAEEFDYW

SEQ ID NO: 53970 - protein, 22 aa, Homo sapiens
CAKVGFMITFGGVITLGAFDIW

SEQ ID NO: 53971 - protein, 20 aa, Homo sapiens
CASSASIRAYSGYDAQFDYW

SEQ ID NO: 53972 - protein, 20 aa, Homo sapiens
CATSNYDYIWGSYRSVFDYW

SEQ ID NO: 53973 - protein, 20 aa, Homo sapiens
CARSRGELLHYYYYYYMDVW

SEQ ID NO: 53974 - protein, 15 aa, Homo sapiens
CARKSHFWSGHFDYW

SEQ ID NO: 53975 - protein, 17 aa, Homo sapiens
CATAWAYSSEPPSIDYW

SEQ ID NO: 53976 - protein, 23 aa, Homo sapiens
CAHSSGYCSGGSCYPAGLSFDYW

SEQ ID NO: 53977 - protein, 14 aa, Homo sapiens
CARADKSGSYFDYW

SEQ ID NO: 53978 - protein, 16 aa, Homo sapiens
CATQKSSLYDNPFDYW

SEQ ID NO: 53979 - protein, 18 aa, Homo sapiens
CARGSGVVAATRSAFDIW

SEQ ID NO: 53980 - protein, 29 aa, Homo sapiens
CAKDLMYYDILTGYLRNPGVYYYYGMDVW

SEQ ID NO: 53981 - protein, 20 aa, Homo sapiens
CAHIILLDYSSGWYGAFDIW

SEQ ID NO: 53982 - protein, 17 aa, Homo sapiens
CATELTPWNFRGELDYW

SEQ ID NO: 53983 - protein, 21 aa, Homo sapiens
CARTPLTIFGVAPMVDGMDVW

SEQ ID NO: 53984 - protein, 14 aa, Homo sapiens
CARDIAKEWRFDNW

SEQ ID NO: 53985 - protein, 19 aa, Homo sapiens
CANGRGYSGYGAAEYFDYW

SEQ ID NO: 53986 - protein, 19 aa, Homo sapiens
CARFGAEPYGSGSYVFDYW

SEQ ID NO: 53987 - protein, 13 aa, Homo sapiens
CARVGSGWIFDFW

SEQ ID NO: 53988 - protein, 19 aa, Homo sapiens
CARMRKHLVDYYYYGLDVW

SEQ ID NO: 53989 - protein, 21 aa, Homo sapiens
CATLRPDYYDSSGINNWFDPW

SEQ ID NO: 53990 - protein, 18 aa, Homo sapiens
CARVEIAARPMGDAFDIW

SEQ ID NO: 53991 - protein, 20 aa, Homo sapiens
CAKTMGPYYYGSGSYQFDYW

SEQ ID NO: 53992 - protein, 19 aa, Homo sapiens
CTRPVTTRLFSASVWFDPW

SEQ ID NO: 53993 - protein, 24 aa, Homo sapiens
CARDLTAHCTGGVCYMTLGAFDPW

SEQ ID NO: 53994 - protein, 21 aa, Homo sapiens
CARQTYYYSSGLPTNTGFDYW

SEQ ID NO: 53995 - protein, 24 aa, Homo sapiens
CARGGGDYYDSSGYFYGKYYFDYW

SEQ ID NO: 53996 - protein, 19 aa, Homo sapiens
CARGVAVPGTVRSRWFDPW

SEQ ID NO: 53997 - protein, 25 aa, Homo sapiens
CARDSGGSVVVVAATYYYYYGMDVW

SEQ ID NO: 53998 - protein, 23 aa, Homo sapiens
CATTPAYCGGDCYSEGHRVFDYW

SEQ ID NO: 53999 - protein, 17 aa, Homo sapiens
CARSGVAAVAGTLFDPW

SEQ ID NO: 54000 - protein, 18 aa, Homo sapiens
CARDFGVQLWKENAFDIW

SEQ ID NO: 54001 - protein, 16 aa, Homo sapiens
CAHRQLLWSSNWFDPW

SEQ ID NO: 54002 - protein, 22 aa, Homo sapiens
CASWATRLGIAAAGMIVRPDYW

SEQ ID NO: 54003 - protein, 16 aa, Homo sapiens
CAKERRDGYNYGTDYW

SEQ ID NO: 54004 - protein, 16 aa, Homo sapiens
CARLRADPPYTEKDYW

SEQ ID NO: 54005 - protein, 20 aa, Homo sapiens
CARGFVRDSSVDTLDAFDIW

SEQ ID NO: 54006 - protein, 18 aa, Homo sapiens
CARVSLIMTTVTTHFDYW

SEQ ID NO: 54007 - protein, 19 aa, Homo sapiens
CARQDYYDSTIYWNWFDPW

SEQ ID NO: 54008 - protein, 16 aa, Homo sapiens
CARNQYYYDSRGFDYW

SEQ ID NO: 54009 - protein, 19 aa, Homo sapiens
CAGSQLERRDYYYYGMDVW

SEQ ID NO: 54010 - protein, 14 aa, Homo sapiens
CMHGTHWPPPGYVF

SEQ ID NO: 54011 - protein, 20 aa, Homo sapiens
CARDPVFRELSGYYYYMDVW

SEQ ID NO: 54012 - protein, 22 aa, Homo sapiens
CARHFTLVQDDPDYNYYGMDVW

SEQ ID NO: 54013 - protein, 14 aa, Homo sapiens
CASLADEWLPRDYW

SEQ ID NO: 54014 - protein, 25 aa, Homo sapiens
CTSLIAARPEILLGWGINTVIVDYW

SEQ ID NO: 54015 - protein, 19 aa, Homo sapiens
CARLLGSTVTTYDWYFDLW

SEQ ID NO: 54016 - protein, 14 aa, Homo sapiens
CARGYSSGYCVDYW

SEQ ID NO: 54017 - protein, 15 aa, Homo sapiens
CARVELLLQDYFDYW

SEQ ID NO: 54018 - protein, 17 aa, Homo sapiens
CAKADYGSGSYRLPDYW

SEQ ID NO: 54019 - protein, 24 aa, Homo sapiens
CARDLVYYDFWSGYYKGYYGMDVW

SEQ ID NO: 54020 - protein, 24 aa, Homo sapiens
CARRRSYYDILTGYQGLYNWFDPW

SEQ ID NO: 54021 - protein, 17 aa, Homo sapiens
CAAASSGYPRDTHFDYW

SEQ ID NO: 54022 - protein, 18 aa, Homo sapiens
CAGWATSGWYEDRWFDPW

SEQ ID NO: 54023 - protein, 15 aa, Homo sapiens
CARGGGGYYEKIDYW

SEQ ID NO: 54024 - protein, 14 aa, Homo sapiens
CAKGGTVTRDFDYW

SEQ ID NO: 54025 - protein, 16 aa, Homo sapiens
CAANYGDYGLDYFDYW

SEQ ID NO: 54026 - protein, 23 aa, Homo sapiens
CASAYDFWSGYFYVTRTDAFDIW

SEQ ID NO: 54027 - protein, 19 aa, Homo sapiens
CARIVWYYGSGSYFDIDYW

SEQ ID NO: 54028 - protein, 19 aa, Homo sapiens
CTTDSYDYIWGRSDAFDIW

SEQ ID NO: 54029 - protein, 14 aa, Homo sapiens
CASLPMDYYYMDVW

SEQ ID NO: 54030 - protein, 20 aa, Homo sapiens
CAREMFGGYNWNDGGPQDYW

SEQ ID NO: 54031 - protein, 13 aa, Homo sapiens
CQSADSIITYPVF

SEQ ID NO: 54032 - protein, 16 aa, Homo sapiens
CARSRGFRRGSWFDPW

SEQ ID NO: 54033 - protein, 17 aa, Homo sapiens
CARLIGEATIMDYFDYW

SEQ ID NO: 54034 - protein, 16 aa, Homo sapiens
CARDFGVGAVPTFDYW

SEQ ID NO: 54035 - protein, 16 aa, Homo sapiens
CAHRPLTMVQGGFDYW

SEQ ID NO: 54036 - protein, 21 aa, Homo sapiens
CARDRGGVWNYAQYYYGMDVW

SEQ ID NO: 54037 - protein, 27 aa, Homo sapiens
CARKTGYCTGGVCYTPHYYYYYGMDVW

SEQ ID NO: 54038 - protein, 21 aa, Homo sapiens
CARDAPYYDSSGYPAPWFDPW

SEQ ID NO: 54039 - protein, 23 aa, Homo sapiens
CARGGLPTFGGVIVIPDFSFDYW

SEQ ID NO: 54040 - protein, 16 aa, Homo sapiens
CAREGLTGDSYYFDYW

SEQ ID NO: 54041 - protein, 21 aa, Homo sapiens
CARGGSVEVEPAAIQLYLDSW

SEQ ID NO: 54042 - protein, 18 aa, Homo sapiens
CARIHYDSSGYVGYFDYW

SEQ ID NO: 54043 - protein, 21 aa, Homo sapiens
CAREFITGTTVKNYYYYMDVW

SEQ ID NO: 54044 - protein, 13 aa, Homo sapiens
CQQYNGYSPGVTF

SEQ ID NO: 54045 - protein, 16 aa, Homo sapiens
CARGKLEDSRDAFDIW

SEQ ID NO: 54046 - protein, 22 aa, Homo sapiens
CAGMIVVVATAIDFVDYYFDSW

SEQ ID NO: 54047 - protein, 16 aa, Homo sapiens
CARDETLRVSGNLDYW

SEQ ID NO: 54048 - protein, 18 aa, Homo sapiens
CARYMITFGGVPWAFDIW

SEQ ID NO: 54049 - protein, 22 aa, Homo sapiens
CARAYAHYYDSSGYYRDAFDIW

SEQ ID NO: 54050 - protein, 18 aa, Homo sapiens
CARREGLNGNYVIAFDDW

SEQ ID NO: 54051 - protein, 18 aa, Homo sapiens
CARTEGISMIVVGAFDIW

SEQ ID NO: 54052 - protein, 27 aa, Homo sapiens
CARDRRVIVVVPADTTRGYYYYGMDVW

SEQ ID NO: 54053 - protein, 20 aa, Homo sapiens
CARARAQCGGACSWYYSDFW

SEQ ID NO: 54054 - protein, 12 aa, Homo sapiens
CQSYHSSIVWAF

SEQ ID NO: 54055 - protein, 21 aa, Homo sapiens
CARAPRQLVRFFYYYYGMDVW

SEQ ID NO: 54056 - protein, 24 aa, Homo sapiens
CATGVSPYSSSWYAGKGPVWFDPW

SEQ ID NO: 54057 - protein, 23 aa, Homo sapiens
CARVSPDYYDSTKDYYYYGMDVW

SEQ ID NO: 54058 - protein, 17 aa, Homo sapiens
CAKDLPLYDFGGPFDYW

SEQ ID NO: 54059 - protein, 17 aa, Homo sapiens
CARGAAMHYYYYGMDVW

SEQ ID NO: 54060 - protein, 25 aa, Homo sapiens
CARDWGGYYDFWSGYPRYDGAIDYW

SEQ ID NO: 54061 - protein, 18 aa, Homo sapiens
CARMRWELPERAYYFDYW

SEQ ID NO: 54062 - protein, 19 aa, Homo sapiens
CARILGPHDYDDLNWFDPW

SEQ ID NO: 54063 - protein, 14 aa, Homo sapiens
CATVPLIERAFDIW

SEQ ID NO: 54064 - protein, 18 aa, Homo sapiens
CATERQYYDFWSGSFDYW

SEQ ID NO: 54065 - protein, 14 aa, Homo sapiens
CGISATVVRPFDYW

SEQ ID NO: 54066 - protein, 17 aa, Homo sapiens
CGRDLIVGDPGGAFDIW

SEQ ID NO: 54067 - protein, 21 aa, Homo sapiens
CAVSGVHGSCSGGVCGPFDHW

SEQ ID NO: 54068 - protein, 16 aa, Homo sapiens
CARRSDGSGWANFDYW

SEQ ID NO: 54069 - protein, 17 aa, Homo sapiens
CARLPLVGSDCYYFDYW

SEQ ID NO: 54070 - protein, 21 aa, Homo sapiens
CARVDYDILTGRPRSVWFDPW

SEQ ID NO: 54071 - protein, 15 aa, Homo sapiens
CTRDSFYGDPPNDYW

SEQ ID NO: 54072 - protein, 23 aa, Homo sapiens
CARIRWLSDKSGYYYPSYGMDVW

SEQ ID NO: 54073 - protein, 19 aa, Homo sapiens
CARVVLSDDFWSGYHFDYW

SEQ ID NO: 54074 - protein, 18 aa, Homo sapiens
CASVFLEVPTSNYYMDVW

SEQ ID NO: 54075 - protein, 12 aa, Homo sapiens
CQQSYGTPLFAF

SEQ ID NO: 54076 - protein, 22 aa, Homo sapiens
CARDYVGKVDTAMVRGAHFDYW

SEQ ID NO: 54077 - protein, 21 aa, Homo sapiens
CARLGARTKEIYGDDVWFDPW

SEQ ID NO: 54078 - protein, 18 aa, Homo sapiens
CARRITIFCSEGCAFDIW

SEQ ID NO: 54079 - protein, 19 aa, Homo sapiens
CTRGPTVFGVVIVGWFDPW

SEQ ID NO: 54080 - protein, 22 aa, Homo sapiens
CAREGEYYDILTGYYNRYFDYW

SEQ ID NO: 54081 - protein, 21 aa, Homo sapiens
CALQGTVAYLDPYYYYGMDVW

SEQ ID NO: 54082 - protein, 18 aa, Homo sapiens
CVRQHISAGAYDWYFDLW

SEQ ID NO: 54083 - protein, 14 aa, Homo sapiens
CATYCGGDCPGDYW

SEQ ID NO: 54084 - protein, 19 aa, Homo sapiens
CARVRDYGDYGGSDWFDPW

SEQ ID NO: 54085 - protein, 24 aa, Homo sapiens
CARHKIRYSSGWYELGSYNWFDPW

SEQ ID NO: 54086 - protein, 17 aa, Homo sapiens
CARIPEWTHPWPAFDIW

SEQ ID NO: 54087 - protein, 16 aa, Homo sapiens
CARVFGYGDYSPGDYW

SEQ ID NO: 54088 - protein, 17 aa, Homo sapiens
CARLDGQQLVTDWFDPW

SEQ ID NO: 54089 - protein, 17 aa, Homo sapiens
CARATAYGDGGSCFDYW

SEQ ID NO: 54090 - protein, 11 aa, Homo sapiens
CQQYNNWRPHF

SEQ ID NO: 54091 - protein, 27 aa, Homo sapiens
CAREPTYYDFWSGYYSRDYYYYGMDVW

SEQ ID NO: 54092 - protein, 16 aa, Homo sapiens
CARARLGETYWYFDLW

SEQ ID NO: 54093 - protein, 23 aa, Homo sapiens
CAKDTQYCTGGVCWYYYYGMDVW

SEQ ID NO: 54094 - protein, 19 aa, Homo sapiens
CARDITATPLGYYYGMDVW

SEQ ID NO: 54095 - protein, 16 aa, Homo sapiens
CARHVEPSWEGSFDPW

SEQ ID NO: 54096 - protein, 17 aa, Homo sapiens
CAKNLTPEYYYYYMDVW

SEQ ID NO: 54097 - protein, 27 aa, Homo sapiens
CARDGGYSSSWFVPLAHQPYYYYMDVW

SEQ ID NO: 54098 - protein, 19 aa, Homo sapiens
CVKDSPRYYYGSGSYFVYW

SEQ ID NO: 54099 - protein, 22 aa, Homo sapiens
CARDLPIYDFWSGYYKEDFDYW

SEQ ID NO: 54100 - protein, 26 aa, Homo sapiens
CARWTEGPLTIFGVAPNYYYYYMDVW

SEQ ID NO: 54101 - protein, 18 aa, Homo sapiens
CATDTPVDLYVVYALDYW

SEQ ID NO: 54102 - protein, 17 aa, Homo sapiens
CARQLYTPRLSWYFDYW

SEQ ID NO: 54103 - protein, 22 aa, Homo sapiens
CAREGDSCSGGSCLAFAWFDPW

SEQ ID NO: 54104 - protein, 21 aa, Homo sapiens
CARHYRYCTGGVCYFDWFDPW

SEQ ID NO: 54105 - protein, 16 aa, Homo sapiens
CARSETPVAGTGVDYW

SEQ ID NO: 54106 - protein, 14 aa, Homo sapiens
CARDKGGYSLPDYW

SEQ ID NO: 54107 - protein, 22 aa, Homo sapiens
CATGPSIVVVPAAKKGGWFDPW

SEQ ID NO: 54108 - protein, 18 aa, Homo sapiens
CARTVCSSTSCSGGFDPW

SEQ ID NO: 54109 - protein, 13 aa, Homo sapiens
CAKWDGDSPFDYW

SEQ ID NO: 54110 - protein, 16 aa, Homo sapiens
CASGSGYYASDGFDFW

SEQ ID NO: 54111 - protein, 20 aa, Homo sapiens
CARELVQGVDYYYYYYMDVW

SEQ ID NO: 54112 - protein, 16 aa, Homo sapiens
CVAGYSGYDSYYFDYW

SEQ ID NO: 54113 - protein, 21 aa, Homo sapiens
CARDWRPIYGDYVPKDYFDYW

SEQ ID NO: 54114 - protein, 18 aa, Homo sapiens
CASFYGDSAYYYYYMDVW

SEQ ID NO: 54115 - protein, 22 aa, Homo sapiens
CAREAPVGDYGDYLGSFYFDYW

SEQ ID NO: 54116 - protein, 15 aa, Homo sapiens
CARIMLGYHCAMDVW

SEQ ID NO: 54117 - protein, 25 aa, Homo sapiens
CASLYSSSWDPLNNNYYYYYGMDVW

SEQ ID NO: 54118 - protein, 15 aa, Homo sapiens
CAREDSLLFDGLDYW

SEQ ID NO: 54119 - protein, 18 aa, Homo sapiens
CARSHYYDSSGIVPLDYW

SEQ ID NO: 54120 - protein, 24 aa, Homo sapiens
CAKDPRVLRYFDWLFQAEIINDYW

SEQ ID NO: 54121 - protein, 14 aa, Homo sapiens
CADSSGYYSDIDYW

SEQ ID NO: 54122 - protein, 24 aa, Homo sapiens
CARSGYCSGGSCSLGYYYYYMDVW

SEQ ID NO: 54123 - protein, 19 aa, Homo sapiens
CAKLPSPFYGDYGGGFDYW

SEQ ID NO: 54124 - protein, 18 aa, Homo sapiens
CARDGLMYSRSNKEFDPW

SEQ ID NO: 54125 - protein, 23 aa, Homo sapiens
CARNEGYCSGGSCYLTHYYMDVW

SEQ ID NO: 54126 - protein, 17 aa, Homo sapiens
CARHSVMEWFLGWFDPW

SEQ ID NO: 54127 - protein, 15 aa, Homo sapiens
CARDKNSNSDAFDIW

SEQ ID NO: 54128 - protein, 25 aa, Homo sapiens
CARGVVEYYYDSSGVTSKESWFDPW

SEQ ID NO: 54129 - protein, 16 aa, Homo sapiens
CATVFSITNHVPFDYW

SEQ ID NO: 54130 - protein, 26 aa, Homo sapiens
CARDVGYCSSTSCYAGGYYYYGMDVW

SEQ ID NO: 54131 - protein, 17 aa, Homo sapiens
CAAPRRIFVAAIDFDCW

SEQ ID NO: 54132 - protein, 20 aa, Homo sapiens
CARDIPIVVVPDATEAFDIW

SEQ ID NO: 54133 - protein, 16 aa, Homo sapiens
CARDPVYTVTHNFDYW

SEQ ID NO: 54134 - protein, 16 aa, Homo sapiens
CARIRISLFTYYFDYW

SEQ ID NO: 54135 - protein, 29 aa, Homo sapiens
CARGLEPYYDYIWGSYRTRDYYYYYMDVW

SEQ ID NO: 54136 - protein, 21 aa, Homo sapiens
CARAGIRFLETDPDTYYFDYW

SEQ ID NO: 54137 - protein, 15 aa, Homo sapiens
CARSYDSSRAPFDYW

SEQ ID NO: 54138 - protein, 18 aa, Homo sapiens
CARDPAYDSSGTDAFDIW

SEQ ID NO: 54139 - protein, 13 aa, Homo sapiens
CASLIADDAFDIW

SEQ ID NO: 54140 - protein, 19 aa, Homo sapiens
CARDQGIAAADDRVNSDYW

SEQ ID NO: 54141 - protein, 19 aa, Homo sapiens
CARILGSSGWTGDDAFDIW

SEQ ID NO: 54142 - protein, 16 aa, Homo sapiens
CARAGPPPTDDAFDYW

SEQ ID NO: 54143 - protein, 26 aa, Homo sapiens
CARLGMYEEAIFGEVIIPGFDAFDIW

SEQ ID NO: 54144 - protein, 21 aa, Homo sapiens
CARSNTGYSSGWYGGDYFDYW

SEQ ID NO: 54145 - protein, 18 aa, Homo sapiens
CARGGRGGDPVQQDFDYW

SEQ ID NO: 54146 - protein, 17 aa, Homo sapiens
CARRSSYDSGGSAFDYW

SEQ ID NO: 54147 - protein, 19 aa, Homo sapiens
CARLTLGGYPPYYYGMDVW

SEQ ID NO: 54148 - protein, 23 aa, Homo sapiens
CARGYCSSTSCPSRDYYYYMDVW

SEQ ID NO: 54149 - protein, 14 aa, Homo sapiens
CARVLAVAESFDYW

SEQ ID NO: 54150 - protein, 18 aa, Homo sapiens
CARDSGSGSYYGTTFDYW

SEQ ID NO: 54151 - protein, 19 aa, Homo sapiens
CTTDRCYYDSSGCADFDYW

SEQ ID NO: 54152 - protein, 17 aa, Homo sapiens
CARDAAGPGGGGWFDPW

SEQ ID NO: 54153 - protein, 15 aa, Homo sapiens
CATDHYSNYGLLDYW

SEQ ID NO: 54154 - protein, 24 aa, Homo sapiens
CASTSLRFLEWTQDGWSGGWFDPW

SEQ ID NO: 54155 - protein, 17 aa, Homo sapiens
CARGYTIYGYYYYMDVW

SEQ ID NO: 54156 - protein, 15 aa, Homo sapiens
CARAPVPATFYFDYW

SEQ ID NO: 54157 - protein, 21 aa, Homo sapiens
CARDGEIVEPGIYYYYGMDVW

SEQ ID NO: 54158 - protein, 19 aa, Homo sapiens
CAKAAFYGDYVSNNWFDPW

SEQ ID NO: 54159 - protein, 17 aa, Homo sapiens
CATGFAVYGGNSVLDYW

SEQ ID NO: 54160 - protein, 24 aa, Homo sapiens
CARDRSPLVVCSSTSCRDWYFDLW

SEQ ID NO: 54161 - protein, 23 aa, Homo sapiens
CAKEARTRDNIWGSYRQYYFDYW

SEQ ID NO: 54162 - protein, 20 aa, Homo sapiens
CARYVAGATYVEGDYYFDYW

SEQ ID NO: 54163 - protein, 25 aa, Homo sapiens
CARDPGNPVTFGGVIVEPSGAFDIW

SEQ ID NO: 54164 - protein, 20 aa, Homo sapiens
CARVPLLGQLLPPYNWFDPW

SEQ ID NO: 54165 - protein, 23 aa, Homo sapiens
CARDRWINYDILTGYYAYYFDYW

SEQ ID NO: 54166 - protein, 23 aa, Homo sapiens
CARDLQDYDILTGYRTLGAFDIW

SEQ ID NO: 54167 - protein, 18 aa, Homo sapiens
CARLVRIAVAGSHWFDPW

SEQ ID NO: 54168 - protein, 17 aa, Homo sapiens
CARDRGDRRWGRYFDYW

SEQ ID NO: 54169 - protein, 22 aa, Homo sapiens
CARQNFGDYVSKHYYYYYMDVW

SEQ ID NO: 54170 - protein, 21 aa, Homo sapiens
CAREITERYFDWGQAYYFDYW

SEQ ID NO: 54171 - protein, 21 aa, Homo sapiens
CARGRYYEWLFRRGHYYFDFW

SEQ ID NO: 54172 - protein, 25 aa, Homo sapiens
CARVWAHDTIFGVVNPPDPDWFDPW

SEQ ID NO: 54173 - protein, 23 aa, Homo sapiens
CARGGYGSGSYYNRPIYNWFDPW

SEQ ID NO: 54174 - protein, 17 aa, Homo sapiens
CARLEFRGSKERCFDYW

SEQ ID NO: 54175 - protein, 18 aa, Homo sapiens
CARDGEAVAGVYWYFDLW

SEQ ID NO: 54176 - protein, 19 aa, Homo sapiens
CAKGNYDSSGYYLSWFDPW

SEQ ID NO: 54177 - protein, 22 aa, Homo sapiens
CARVGVGGTTFPVYYYYGMDVW

SEQ ID NO: 54178 - protein, 22 aa, Homo sapiens
CARDLLDCSSTSCYYYYGMDVW

SEQ ID NO: 54179 - protein, 23 aa, Homo sapiens
CARDPLSYDILTGYYTHNWFDPW

SEQ ID NO: 54180 - protein, 19 aa, Homo sapiens
CAADIRYSNAHYYYYMDVW

SEQ ID NO: 54181 - protein, 22 aa, Homo sapiens
CATESVSVQLERIYYYYGMDVW

SEQ ID NO: 54182 - protein, 16 aa, Homo sapiens
CAHRRTAWVSPYFDYW

SEQ ID NO: 54183 - protein, 22 aa, Homo sapiens
CAADPLYDSSGYYSYYYYMDVW

SEQ ID NO: 54184 - protein, 14 aa, Homo sapiens
CASCGFGSYYCVYW

SEQ ID NO: 54185 - protein, 17 aa, Homo sapiens
CASLNSPIAVAGRLDYW

SEQ ID NO: 54186 - protein, 17 aa, Homo sapiens
CARGTTIAAAGYYFAYW

SEQ ID NO: 54187 - protein, 17 aa, Homo sapiens
CATDSRPFLEWFPLDYW

SEQ ID NO: 54188 - protein, 25 aa, Homo sapiens
CARGNTIFGVVPEPDYYYYYYMDVW

SEQ ID NO: 54189 - protein, 23 aa, Homo sapiens
CARGYDFWSGLSADYYYYYMDVW

SEQ ID NO: 54190 - protein, 25 aa, Homo sapiens
CARAPSRFDYCSGGSCYYYYGMDVW

SEQ ID NO: 54191 - protein, 18 aa, Homo sapiens
CARDGSDYYDSSGLLDYW

SEQ ID NO: 54192 - protein, 23 aa, Homo sapiens
CARRGTPITVVQGLIMGNWFDPW

SEQ ID NO: 54193 - protein, 18 aa, Homo sapiens
CARGIVGASSPLGWFDPW

SEQ ID NO: 54194 - protein, 15 aa, Homo sapiens
CARDTPSGFHYFDCW

SEQ ID NO: 54195 - protein, 16 aa, Homo sapiens
CARDFCSTTTCRFDYW

SEQ ID NO: 54196 - protein, 14 aa, Homo sapiens
CARGFYGDYHFDSW

SEQ ID NO: 54197 - protein, 19 aa, Homo sapiens
CARHYIPFYCSSTSCYDYW

SEQ ID NO: 54198 - protein, 15 aa, Homo sapiens
CARIRVVACSCLDYW

SEQ ID NO: 54199 - protein, 16 aa, Homo sapiens
CARVVAVAGPLVWDYW

SEQ ID NO: 54200 - protein, 21 aa, Homo sapiens
CATLPGEGYDYPNNYYYMDVW

SEQ ID NO: 54201 - protein, 17 aa, Homo sapiens
CARLSGDIVVVAYFDYW

SEQ ID NO: 54202 - protein, 20 aa, Homo sapiens
CVKVSPTYYFDSSGYFFDYW

SEQ ID NO: 54203 - protein, 22 aa, Homo sapiens
CARAFGRFPTPRTLYYYGMDVW

SEQ ID NO: 54204 - protein, 15 aa, Homo sapiens
CAKRSASGSYYFDYW

SEQ ID NO: 54205 - protein, 17 aa, Homo sapiens
CARLRADTYYYHYMDVW

SEQ ID NO: 54206 - protein, 22 aa, Homo sapiens
CARDNSSTTLYCSGGSCLLDYW

SEQ ID NO: 54207 - protein, 22 aa, Homo sapiens
CARDAYIWGSYRYGRSNWFDPW

SEQ ID NO: 54208 - protein, 17 aa, Homo sapiens
CARMYDSSGYWVGFDYW

SEQ ID NO: 54209 - protein, 15 aa, Homo sapiens
CASFLSGGDYSVDYW

SEQ ID NO: 54210 - protein, 16 aa, Homo sapiens
CAQIRKNGYDRHFDYW

SEQ ID NO: 54211 - protein, 25 aa, Homo sapiens
CARGPVYDFWSGYLSWFHLGAFDIW

SEQ ID NO: 54212 - protein, 16 aa, Homo sapiens
CTRGPHGYDQYQFDYW

SEQ ID NO: 54213 - protein, 20 aa, Homo sapiens
CAREERDLIGVVIRGYMDVW

SEQ ID NO: 54214 - protein, 17 aa, Homo sapiens
CARLSFFSDFWSGPDYW

SEQ ID NO: 54215 - protein, 13 aa, Homo sapiens
CTRDIHSWYFDLW

SEQ ID NO: 54216 - protein, 16 aa, Homo sapiens
CARGGHYDSSGYGYYW

SEQ ID NO: 54217 - protein, 24 aa, Homo sapiens
CARDRTDSGEEDFWRMYYYGMDVW

SEQ ID NO: 54218 - protein, 23 aa, Homo sapiens
CARDPAPPQIFGGRYYYYGMDVW

SEQ ID NO: 54219 - protein, 22 aa, Homo sapiens
CARDPTYYYDSSGYYYGELDYW

SEQ ID NO: 54220 - protein, 24 aa, Homo sapiens
CARDPARRYDYIWGSYFFSGPDYW

SEQ ID NO: 54221 - protein, 31 aa, Homo sapiens
CAKDSVYYDFWSGYFPERARESYYYYGMDVW

SEQ ID NO: 54222 - protein, 21 aa, Homo sapiens
CARVYCGGDCSNYYYYYMDVW

SEQ ID NO: 54223 - protein, 21 aa, Homo sapiens
CARDQGLWFRALYYYYGMDVW

SEQ ID NO: 54224 - protein, 20 aa, Homo sapiens
CAHRKDYSDFWTGTYVFDYW

SEQ ID NO: 54225 - protein, 23 aa, Homo sapiens
CATKPPIYYGSGSPLNPDAFDIW

SEQ ID NO: 54226 - protein, 24 aa, Homo sapiens
CARRGGSGSYSYTGLDYYYGMDVW

SEQ ID NO: 54227 - protein, 18 aa, Homo sapiens
CATGESGWLRTVNWFDPW

SEQ ID NO: 54228 - protein, 18 aa, Homo sapiens
CARLIGRRATVTPRFDYW

SEQ ID NO: 54229 - protein, 15 aa, Homo sapiens
CAHRAGILTGYYGYW

SEQ ID NO: 54230 - protein, 15 aa, Homo sapiens
CARVAVTTFNLVDYW

SEQ ID NO: 54231 - protein, 17 aa, Homo sapiens
CAQVPVYGGHSVVLDYW

SEQ ID NO: 54232 - protein, 14 aa, Homo sapiens
CAHTMTRAAYFDYW

SEQ ID NO: 54233 - protein, 18 aa, Homo sapiens
CVKAYCSSASCMYYFDSW

SEQ ID NO: 54234 - protein, 21 aa, Homo sapiens
CATAPAIAVAGTTPKRWFDPW

SEQ ID NO: 54235 - protein, 17 aa, Homo sapiens
CAKVPTMIVVEGAFDIW

SEQ ID NO: 54236 - protein, 21 aa, Homo sapiens
CARVEDFYDFWSGYYTGIDYW

SEQ ID NO: 54237 - protein, 21 aa, Homo sapiens
CARGHQGVVRRFLEWLPPDYW

SEQ ID NO: 54238 - protein, 17 aa, Homo sapiens
CARHPPYSSGSARFDSW

SEQ ID NO: 54239 - protein, 20 aa, Homo sapiens
CARDPNRGGWEQWLIFFDYW

SEQ ID NO: 54240 - protein, 22 aa, Homo sapiens
CARDNYYDSSGYYYDTEYFQHW

SEQ ID NO: 54241 - protein, 21 aa, Homo sapiens
CAKDEVGTIFGVVYYYGMDVW

SEQ ID NO: 54242 - protein, 17 aa, Homo sapiens
CAIGADMTTVTTHFDYW

SEQ ID NO: 54243 - protein, 20 aa, Homo sapiens
CAHRQPDLLTGFPRDAFDIW

SEQ ID NO: 54244 - protein, 26 aa, Homo sapiens
CARGLVYDFWSGLLNPDYYYYGMDVW

SEQ ID NO: 54245 - protein, 17 aa, Homo sapiens
CARDLLAKTGGSYFPYW

SEQ ID NO: 54246 - protein, 20 aa, Homo sapiens
CARAISGYYFGSGSYYFDNW

SEQ ID NO: 54247 - protein, 23 aa, Homo sapiens
CARDWTTTVIPDSYYYYYGMDVW

SEQ ID NO: 54248 - protein, 15 aa, Homo sapiens
CARVSGPPVAGIDYW

SEQ ID NO: 54249 - protein, 17 aa, Homo sapiens
CAKFNGPGLKLYAMDVW

SEQ ID NO: 54250 - protein, 15 aa, Homo sapiens
CARDRGVATMELDYW

SEQ ID NO: 54251 - protein, 21 aa, Homo sapiens
CARDHYDSSGSSLVSWYFDLW

SEQ ID NO: 54252 - protein, 22 aa, Homo sapiens
CARARQGGCSGGSCYPYYFDYW

SEQ ID NO: 54253 - protein, 27 aa, Homo sapiens
CARDLQKLVYDILTGYSRYYYYGMDVW

SEQ ID NO: 54254 - protein, 18 aa, Homo sapiens
CAKLTLSSGWYGDAFDIW

SEQ ID NO: 54255 - protein, 21 aa, Homo sapiens
CARMSLGYCTGGVCYSGFDPW

SEQ ID NO: 54256 - protein, 16 aa, Homo sapiens
CARHIYSSSFSGVDYW

SEQ ID NO: 54257 - protein, 15 aa, Homo sapiens
CARSDVLRYGGGDYW

SEQ ID NO: 54258 - protein, 20 aa, Homo sapiens
CAKIPAAYSSSWYGDDVDYW

SEQ ID NO: 54259 - protein, 19 aa, Homo sapiens
CARDAKISYGWNDEGVDYW

SEQ ID NO: 54260 - protein, 19 aa, Homo sapiens
CARERGVFEYQPSYYFDYW

SEQ ID NO: 54261 - protein, 19 aa, Homo sapiens
CATAPEAYCNGGCYYIDNW

SEQ ID NO: 54262 - protein, 19 aa, Homo sapiens
CARRVGASLAIVDDAFDIW

SEQ ID NO: 54263 - protein, 21 aa, Homo sapiens
CATAPRQWELLYLVPNWFDPW

SEQ ID NO: 54264 - protein, 22 aa, Homo sapiens
CARDIPFGITMVQGGQDAFDIW

SEQ ID NO: 54265 - protein, 16 aa, Homo sapiens
CAHGTTVTNVYAFDIW

SEQ ID NO: 54266 - protein, 21 aa, Homo sapiens
CARDRGPNYGDYFLDDAFDIW

SEQ ID NO: 54267 - protein, 22 aa, Homo sapiens
CARGYYDYIWGSYRPFSPFDYW

SEQ ID NO: 54268 - protein, 26 aa, Homo sapiens
CARDQKGKISITIFGVVIHHDAFDIW

SEQ ID NO: 54269 - protein, 12 aa, Homo sapiens
CARGEVQTIDYW

SEQ ID NO: 54270 - protein, 21 aa, Homo sapiens
CARGAHGDYVHYYYYYGMDVW

SEQ ID NO: 54271 - protein, 21 aa, Homo sapiens
CATVGSYCSGGSCWLGEIDYW

SEQ ID NO: 54272 - protein, 17 aa, Homo sapiens
CARAAGIAARLGWFDPW

SEQ ID NO: 54273 - protein, 23 aa, Homo sapiens
CARDGCSGGSCSLVPYYYGMDVW

SEQ ID NO: 54274 - protein, 22 aa, Homo sapiens
CTTVFFFDYSNYVVGSMGFDYW

SEQ ID NO: 54275 - protein, 23 aa, Homo sapiens
CARDLPRYDYIWGSYLGSYFDYW

SEQ ID NO: 54276 - protein, 21 aa, Homo sapiens
CARDIVVVPAAMSGENWFDPW

SEQ ID NO: 54277 - protein, 19 aa, Homo sapiens
CARDSAFYDFWSGYYHDYW

SEQ ID NO: 54278 - protein, 23 aa, Homo sapiens
CARDSERGQPDYNDYYYYGMDVW

SEQ ID NO: 54279 - protein, 18 aa, Homo sapiens
CARSGSPIVWYYYYMDVW

SEQ ID NO: 54280 - protein, 15 aa, Homo sapiens
CAGQHLARPGWFDPW

SEQ ID NO: 54281 - protein, 16 aa, Homo sapiens
CSRGVVGTVFDAFDIW

SEQ ID NO: 54282 - protein, 18 aa, Homo sapiens
CVKDHSYSDGWYNAFDIW

SEQ ID NO: 54283 - protein, 20 aa, Homo sapiens
CARDFPALGGIDGKGDHDYW

SEQ ID NO: 54284 - protein, 19 aa, Homo sapiens
CARDRSSGSYYVVDAFDIW

SEQ ID NO: 54285 - protein, 17 aa, Homo sapiens
CARGRRYSYPYYYMDVW

SEQ ID NO: 54286 - protein, 20 aa, Homo sapiens
CARHDLGYSYGSYYYYMDVW

SEQ ID NO: 54287 - protein, 15 aa, Homo sapiens
CARGFRGDSFSFDYW

SEQ ID NO: 54288 - protein, 19 aa, Homo sapiens
CAREGWLRLFPYYYGMDVW

SEQ ID NO: 54289 - protein, 27 aa, Homo sapiens
CARMPVSAEDVHDCGDGSCYFTWFDPW

SEQ ID NO: 54290 - protein, 22 aa, Homo sapiens
CARDGGGDGSGFLGPFSAFDIW

SEQ ID NO: 54291 - protein, 21 aa, Homo sapiens
CARGGWKTNIPNYYYYYMDVW

SEQ ID NO: 54292 - protein, 20 aa, Homo sapiens
CAKEALDSSGYYASDAFDIW

SEQ ID NO: 54293 - protein, 17 aa, Homo sapiens
CAREWGDGYNAGHFDYW

SEQ ID NO: 54294 - protein, 20 aa, Homo sapiens
CARIGYYDILTGHQRGFDYW

SEQ ID NO: 54295 - protein, 15 aa, Homo sapiens
CVGQWLESGNAFDIW

SEQ ID NO: 54296 - protein, 22 aa, Homo sapiens
CARGQAIAAAGRGYYYYYMDVW

SEQ ID NO: 54297 - protein, 17 aa, Homo sapiens
CATVKAVAGSQHYFDYW

SEQ ID NO: 54298 - protein, 18 aa, Homo sapiens
CARDQGLSVTSLDAFNIW

SEQ ID NO: 54299 - protein, 18 aa, Homo sapiens
CAKDSVSVVVVPAAGDVW

SEQ ID NO: 54300 - protein, 18 aa, Homo sapiens
CATAAAAAGTRTNWFDPW

SEQ ID NO: 54301 - protein, 22 aa, Homo sapiens
CARHVDPYDYIWGSYRYGLDYW

SEQ ID NO: 54302 - protein, 13 aa, Homo sapiens
CARSRSSHWFDPW

SEQ ID NO: 54303 - protein, 16 aa, Homo sapiens
CAHRPGAMNMGYFDYW

SEQ ID NO: 54304 - protein, 22 aa, Homo sapiens
CAKDRITIFGVVILRDGAFDIW

SEQ ID NO: 54305 - protein, 21 aa, Homo sapiens
CARALSQKLLASSDRTPYDYW

SEQ ID NO: 54306 - protein, 27 aa, Homo sapiens
CAREIARGSSSWLAAPGVAYYYGMDVW

SEQ ID NO: 54307 - protein, 20 aa, Homo sapiens
CARNKNSYGPDYSNFCLDYW

SEQ ID NO: 54308 - protein, 18 aa, Homo sapiens
CAHKFPNSGWFHPHFDYW

SEQ ID NO: 54309 - protein, 17 aa, Homo sapiens
CARDSGSAWYGYYFDYW

SEQ ID NO: 54310 - protein, 22 aa, Homo sapiens
CARDTRVTIFGVVMRGGWFDPW

SEQ ID NO: 54311 - protein, 22 aa, Homo sapiens
CAREPESSIAARPDYYYGMDVW

SEQ ID NO: 54312 - protein, 20 aa, Homo sapiens
CARDAGELLRGTINWYFDLW

SEQ ID NO: 54313 - protein, 19 aa, Homo sapiens
CARERLNYGALHPDAFDIW

SEQ ID NO: 54314 - protein, 27 aa, Homo sapiens
CARARGWTYSNGSGRYNFVDYYYMDVW

SEQ ID NO: 54315 - protein, 20 aa, Homo sapiens
CAADPDYGDLQGYHYYMDVW

SEQ ID NO: 54316 - protein, 16 aa, Homo sapiens
CASTTVTTISEYFQHW

SEQ ID NO: 54317 - protein, 19 aa, Homo sapiens
CARITYRDILTGYFAFDVW

SEQ ID NO: 54318 - protein, 23 aa, Homo sapiens
CAKGDLYGSGSYYSYYYYGLDVW

SEQ ID NO: 54319 - protein, 18 aa, Homo sapiens
CTSYGDYDDQRLYYFDYW

SEQ ID NO: 54320 - protein, 15 aa, Homo sapiens
CTRDRVVQGDWFDPW

SEQ ID NO: 54321 - protein, 26 aa, Homo sapiens
CARELAGAPWGTIFGVVIEESAFDYW

SEQ ID NO: 54322 - protein, 18 aa, Homo sapiens
CTTGITIFGVVILNFDYW

SEQ ID NO: 54323 - protein, 20 aa, Homo sapiens
CATLYYDPAPYYYYYYMDVW

SEQ ID NO: 54324 - protein, 15 aa, Homo sapiens
CARGGSGSYWAFDYW

SEQ ID NO: 54325 - protein, 21 aa, Homo sapiens
CARDIAAAHPFYYYYYGMDVW

SEQ ID NO: 54326 - protein, 16 aa, Homo sapiens
CAHRAYGFWSGYFDYW

SEQ ID NO: 54327 - protein, 19 aa, Homo sapiens
CAREKYYYDSSGVGWFDPW

SEQ ID NO: 54328 - protein, 16 aa, Homo sapiens
CATLGTFGTTNAFDIW

SEQ ID NO: 54329 - protein, 21 aa, Homo sapiens
CARDLELRFPTYYYYYYMDVW

SEQ ID NO: 54330 - protein, 22 aa, Homo sapiens
CARAPRNYDFWSGDTNWYFDLW

SEQ ID NO: 54331 - protein, 21 aa, Homo sapiens
CATGPGYCSSTSCHTNWFDPW

SEQ ID NO: 54332 - protein, 24 aa, Homo sapiens
CARDLMITFGELINWGYYYGMDVW

SEQ ID NO: 54333 - protein, 23 aa, Homo sapiens
CARVDIHYDYIWGSYRLGWFDPW

SEQ ID NO: 54334 - protein, 18 aa, Homo sapiens
CARGVVITTRYHDAFDIW

SEQ ID NO: 54335 - protein, 21 aa, Homo sapiens
CARGPNTVTTFFYYYYGMDVW

SEQ ID NO: 54336 - protein, 25 aa, Homo sapiens
CARGHIGINMVVVVFTGGEYFLDYW

SEQ ID NO: 54337 - protein, 18 aa, Homo sapiens
CARHEWGMATITEYFQHW

SEQ ID NO: 54338 - protein, 22 aa, Homo sapiens
CAANPYYYDSSGPPSRAYFQHW

SEQ ID NO: 54339 - protein, 22 aa, Homo sapiens
CAKGQAARGLRYYYYYYGMDVW

SEQ ID NO: 54340 - protein, 17 aa, Homo sapiens
CARGDRMATITSNFDYW

SEQ ID NO: 54341 - protein, 22 aa, Homo sapiens
CARGRYYYDSSGLDHYNWFDPW

SEQ ID NO: 54342 - protein, 14 aa, Homo sapiens [sequence omitted]

SEQ ID NO: 54343 - protein, 19 aa, Homo sapiens
CARHPPLYSGTLENWFDPW

SEQ ID NO: 54344 - protein, 24 aa, Homo sapiens
CARAERVVVVAATPIYYYYGMDVW

SEQ ID NO: 54345 - protein, 14 aa, Homo sapiens
CACDYGDTNYFDYW

SEQ ID NO: 54346 - protein, 14 aa, Homo sapiens
CARGPESGYYFDYW

SEQ ID NO: 54347 - protein, 16 aa, Homo sapiens
CAHRQAGIAAPDFDYW

SEQ ID NO: 54348 - protein, 17 aa, Homo sapiens
CARDRTAWQVRWYLDLW

SEQ ID NO: 54349 - protein, 29 aa, Homo sapiens
CAKDLTYYDFWSGYLDKPITYYYYGMDVW

SEQ ID NO: 54350 - protein, 16 aa, Homo sapiens
CARGVTWNYAGWFDPW

SEQ ID NO: 54351 - protein, 17 aa, Homo sapiens
CARDSIAARPFWYFDLW

SEQ ID NO: 54352 - protein, 22 aa, Homo sapiens
CARDYSEFELGIDYYYYYMDVW

SEQ ID NO: 54353 - protein, 20 aa, Homo sapiens
CARDFREYGDYDNEAAFDIW

SEQ ID NO: 54354 - protein, 25 aa, Homo sapiens
CARGTEDIEYYYDSSGYYSGAFDIW

SEQ ID NO: 54355 - protein, 23 aa, Homo sapiens
CARDFRPRYNWNYDGTGPYFDYW

SEQ ID NO: 54356 - protein, 21 aa, Homo sapiens
CARDLDNDDYIWGSYRPFDYW

SEQ ID NO: 54357 - protein, 20 aa, Homo sapiens
CASIAAAGTPYYYYYYMDVW

SEQ ID NO: 54358 - protein, 17 aa, Homo sapiens
CATDTYGDYVSDAFDIW

SEQ ID NO: 54359 - protein, 17 aa, Homo sapiens
CASQTDADIVATSFGYW

SEQ ID NO: 54360 - protein, 22 aa, Homo sapiens
CARDGAPGSSWFYYYYYGMDVW

SEQ ID NO: 54361 - protein, 20 aa, Homo sapiens
CARDPRTTVVTKGPYYFDYW

SEQ ID NO: 54362 - protein, 18 aa, Homo sapiens
CASFVDDTTVTSQWFDPW

SEQ ID NO: 54363 - protein, 26 aa, Homo sapiens
CARVLTGYLRRYYDSSGYPPDAFDIW

SEQ ID NO: 54364 - protein, 19 aa, Homo sapiens
CARDIIGRWLQGEDAFDIW

SEQ ID NO: 54365 - protein, 18 aa, Homo sapiens
CARDQMNDAAPFDAFDIW

SEQ ID NO: 54366 - protein, 18 aa, Homo sapiens
CAREVVVAAVWDDYFDYW

SEQ ID NO: 54367 - protein, 23 aa, Homo sapiens
CAVSRHYYDSSGYHRAENWFDPW

SEQ ID NO: 54368 - protein, 19 aa, Homo sapiens
CATLTTVTSLGSYYYMDVW

SEQ ID NO: 54369 - protein, 19 aa, Homo sapiens
CARLYCSGGSCYWYYFDYW

SEQ ID NO: 54370 - protein, 18 aa, Homo sapiens
CARLPGYSSGWFGQFDIW

SEQ ID NO: 54371 - protein, 25 aa, Homo sapiens
CAKDGDRDYGDYDPTHYYYYGMDVW

SEQ ID NO: 54372 - protein, 19 aa, Homo sapiens
CARMVVAVLGDYYYGMDVW

SEQ ID NO: 54373 - protein, 28 aa, Homo sapiens
CATEQKGWEYQLLWTMVGPYYYYYMDVW

SEQ ID NO: 54374 - protein, 19 aa, Homo sapiens
CARGADSADFWSGYYPDYW

SEQ ID NO: 54375 - protein, 16 aa, Homo sapiens
CASLYVLTGEGAFDIW

SEQ ID NO: 54376 - protein, 19 aa, Homo sapiens
CARRGKLGYFDESPYFDYW

SEQ ID NO: 54377 - protein, 21 aa, Homo sapiens
CAKPSRSNYDPNPDYYYMDVW

SEQ ID NO: 54378 - protein, 22 aa, Homo sapiens
CARDVEGYDILTGYYSDAFDIW

SEQ ID NO: 54379 - protein, 17 aa, Homo sapiens
CASSKYCSSTSCYVGYW

SEQ ID NO: 54380 - protein, 31 aa, Homo sapiens
CARASWRDGSGSYYNDVARGERYYYYGMDVW

SEQ ID NO: 54381 - protein, 17 aa, Homo sapiens
CARISTSNCWYHSFDYW

SEQ ID NO: 54382 - protein, 23 aa, Homo sapiens
CARDFMSGFWSGYDYYYYGMDVW

SEQ ID NO: 54383 - protein, 21 aa, Homo sapiens
CASWTYYYDSSGYYYGYFQHW

SEQ ID NO: 54384 - protein, 25 aa, Homo sapiens
CAREFQFVSPKMGDYIYYYYYMDVW

SEQ ID NO: 54385 - protein, 23 aa, Homo sapiens
CARDLYDFWSGYTPEGDNWFDPW

SEQ ID NO: 54386 - protein, 16 aa, Homo sapiens
CAREMYRGYSPHFDYW

SEQ ID NO: 54387 - protein, 16 aa, Homo sapiens
CAGDRGGDNEYYFDYW

SEQ ID NO: 54388 - protein, 20 aa, Homo sapiens
CARHRGYDILTGYYTEYDYW

SEQ ID NO: 54389 - protein, 20 aa, Homo sapiens
CARDRDILSTEVGQDAFDIW

SEQ ID NO: 54390 - protein, 18 aa, Homo sapiens
CAREEVDGYNFYYYMDVW

SEQ ID NO: 54391 - protein, 16 aa, Homo sapiens
CARSGAETSSSWTDYW

SEQ ID NO: 54392 - protein, 18 aa, Homo sapiens
CARADPIVLEWLPGFDYW

SEQ ID NO: 54393 - protein, 22 aa, Homo sapiens
CASPSPLGYSNYPAKGYYFDYW

SEQ ID NO: 54394 - protein, 28 aa, Homo sapiens
CARSGVDGLDKDIVVVVAAKGYNWFDPW

SEQ ID NO: 54395 - protein, 27 aa, Homo sapiens
CARDSGVYCSSTSCYADYYYYYYMDVW

SEQ ID NO: 54396 - protein, 13 aa, Homo sapiens
CARHYSSSYPEYW

SEQ ID NO: 54397 - protein, 18 aa, Homo sapiens
CAREGSDSGGWGSAADYW

SEQ ID NO: 54398 - protein, 21 aa, Homo sapiens
CARVFQGHMVQGIPFNWFDPW

SEQ ID NO: 54399 - protein, 26 aa, Homo sapiens
CAREPSAGYSGYDGQGWGLSCELDYW

SEQ ID NO: 54400 - protein, 19 aa, Homo sapiens
CARDLRSRMVVIADPLDYW

SEQ ID NO: 54401 - protein, 16 aa, Homo sapiens
CARGNWNYASWYFDLW

SEQ ID NO: 54402 - protein, 23 aa, Homo sapiens
CARSTVLRYFDWSSLHGYYFDYW

SEQ ID NO: 54403 - protein, 14 aa, Homo sapiens
CARSYGDYVGIDYW

SEQ ID NO: 54404 - protein, 18 aa, Homo sapiens
CAKDPFYDFWSGYYFGYW

SEQ ID NO: 54405 - protein, 18 aa, Homo sapiens
CARGHDYGDLWDNWFDPW

SEQ ID NO: 54406 - protein, 14 aa, Homo sapiens
CARGPRSLYYFDSW

SEQ ID NO: 54407 - protein, 24 aa, Homo sapiens
CARDPPYYYDSSGYYHTPYYFDYW

SEQ ID NO: 54408 - protein, 15 aa, Homo sapiens
CARDVPLGELSSDYW

SEQ ID NO: 54409 - protein, 15 aa, Homo sapiens
CTRGGLSIRNAFDIW

SEQ ID NO: 54410 - protein, 19 aa, Homo sapiens
CARGYCPSGVCFPYYFDYW

SEQ ID NO: 54411 - protein, 34 aa, Homo sapiens
CALPISAVYYCARHLRQCTGGVCHTYYYYGLDVW

SEQ ID NO: 54412 - protein, 20 aa, Homo sapiens
CARDFPHTVFTQTVDAFDIW

SEQ ID NO: 54413 - protein, 18 aa, Homo sapiens
CASWGDYYDSSHPRFDYW

SEQ ID NO: 54414 - protein, 20 aa, Homo sapiens
CARQRGWELLSGLYWYFDLW

SEQ ID NO: 54415 - protein, 22 aa, Homo sapiens
CARGGYGSGSYWGYYYYAMDVW

SEQ ID NO: 54416 - protein, 18 aa, Homo sapiens
CARTYCTGGVCHLAFDIW

SEQ ID NO: 54417 - protein, 18 aa, Homo sapiens
CARLLKSSSGSFFRFDSW

SEQ ID NO: 54418 - protein, 18 aa, Homo sapiens
CARATRLSIAAAADFDYW

SEQ ID NO: 54419 - protein, 20 aa, Homo sapiens
CTRDALYLYYYDSSGIPDYW

SEQ ID NO: 54420 - protein, 22 aa, Homo sapiens
CARQVSTSDYIWGSYRYYFDYW

SEQ ID NO: 54421 - protein, 23 aa, Homo sapiens
CARDGVLRFLEWSPGWGVYFDYW

SEQ ID NO: 54422 - protein, 22 aa, Homo sapiens
CAKDQAKYQLLLGGDGGWFDPW

SEQ ID NO: 54423 - protein, 17 aa, Homo sapiens
CASLWFRDNPGFYMDVW

SEQ ID NO: 54424 - protein, 13 aa, Homo sapiens
CAHHSITMIFDYW

SEQ ID NO: 54425 - protein, 21 aa, Homo sapiens
CARGQGPYCGGDCYINWFDPW

SEQ ID NO: 54426 - protein, 22 aa, Homo sapiens
CARVNYGDYGGVLYYYYYMDVW

SEQ ID NO: 54427 - protein, 15 aa, Homo sapiens
CARVVVAATWYFQHW

SEQ ID NO: 54428 - protein, 19 aa, Homo sapiens
CAKGGGWLTTVTYNWFDPW

SEQ ID NO: 54429 - protein, 19 aa, Homo sapiens
CARTVLPSLEWLPTWFDPW

SEQ ID NO: 54430 - protein, 14 aa, Homo sapiens
CARCPTVTALGDYW

SEQ ID NO: 54431 - protein, 14 aa, Homo sapiens
CARRGPELGRFDYW

SEQ ID NO: 54432 - protein, 20 aa, Homo sapiens
CARDKEDGDYDYYYYYMDVW

SEQ ID NO: 54433 - protein, 21 aa, Homo sapiens
CARDFYDDYSNSYYYYYMDVW

SEQ ID NO: 54434 - protein, 16 aa, Homo sapiens
CARDHAVAAADNSDYW

SEQ ID NO: 54435 - protein, 17 aa, Homo sapiens
CARIGSPSDYYYYMDVW

SEQ ID NO: 54436 - protein, 20 aa, Homo sapiens
CARGRTVTTLFHRSNWFDPW

SEQ ID NO: 54437 - protein, 22 aa, Homo sapiens
CARDGAYYYDSSGWPATYCDYW

SEQ ID NO: 54438 - protein, 21 aa, Homo sapiens
CATSTVTTPLVETTPYYMDVW

SEQ ID NO: 54439 - protein, 17 aa, Homo sapiens
CARGGWKDLAFYYMDVW

SEQ ID NO: 54440 - protein, 15 aa, Homo sapiens
CARNGDYDLEYFHHW

SEQ ID NO: 54441 - protein, 20 aa, Homo sapiens
CARDPKGITIFGVAPYFDYW

SEQ ID NO: 54442 - protein, 19 aa, Homo sapiens
CARTRSGITYYDFWTFDPW

SEQ ID NO: 54443 - protein, 18 aa, Homo sapiens
CAHIDYDSSGYYYSFDYW

SEQ ID NO: 54444 - protein, 17 aa, Homo sapiens
CARDMHNYYDSSGFDYW

SEQ ID NO: 54445 - protein, 23 aa, Homo sapiens
CARDKASADIADWLVPTNWFDPW

SEQ ID NO: 54446 - protein, 20 aa, Homo sapiens
CAREKGGRWIRGVVVPFDPW

SEQ ID NO: 54447 - protein, 25 aa, Homo sapiens
CATVPVYDYIWGSYRPTGYYYMDVW

SEQ ID NO: 54448 - protein, 19 aa, Homo sapiens
CARLPGTSGPTWYYYMDVW

SEQ ID NO: 54449 - protein, 14 aa, Homo sapiens
CARDLRGVINFDYW

SEQ ID NO: 54450 - protein, 24 aa, Homo sapiens
CAKGDVVDGDDRNSYYYYYGMDVW

SEQ ID NO: 54451 - protein, 21 aa, Homo sapiens
CARDRETYYDFWSGYLYMDVW

SEQ ID NO: 54452 - protein, 23 aa, Homo sapiens
CARGGSAVYCSGGSCYRNWFDPW

SEQ ID NO: 54453 - protein, 19 aa, Homo sapiens
CATPSLGIFGVVIYAFDIW

SEQ ID NO: 54454 - protein, 15 aa, Homo sapiens
CARTIVGATLGFDPW

SEQ ID NO: 54455 - protein, 16 aa, Homo sapiens
CAVIVGAISPDAFDIW

SEQ ID NO: 54456 - protein, 18 aa, Homo sapiens
CARDLFWSGYSYYGMDVW

SEQ ID NO: 54457 - protein, 16 aa, Homo sapiens
CARNDYGDSLPYFDYW

SEQ ID NO: 54458 - protein, 20 aa, Homo sapiens
CAKDYSMVLVYYYYYGMDVW

SEQ ID NO: 54459 - protein, 24 aa, Homo sapiens
CARDRGYYDSSGYYYSPTDWFDPW

SEQ ID NO: 54460 - protein, 21 aa, Homo sapiens
CARDTMFFSERYDSSGYPGYW

SEQ ID NO: 54461 - protein, 24 aa, Homo sapiens
CARERDITIFGVVNWGGNYWFDPW

SEQ ID NO: 54462 - protein, 15 aa, Homo sapiens
CARDLTGTTAIGDYW

SEQ ID NO: 54463 - protein, 14 aa, Homo sapiens
CASYGDYGPAFDIW

SEQ ID NO: 54464 - protein, 21 aa, Homo sapiens
CARVLIEWEPLSDYYYGMDVW

SEQ ID NO: 54465 - protein, 17 aa, Homo sapiens
CARLRGGSSGWYYFDYW

SEQ ID NO: 54466 - protein, 18 aa, Homo sapiens
CARDQSSGWSTWAALDYW

SEQ ID NO: 54467 - protein, 20 aa, Homo sapiens
CAKGLYVLRFLEWLFPFDYW

SEQ ID NO: 54468 - protein, 35 aa, Homo sapiens
CARDKQRGSDYDFWSGYPGLGLGEVYYYYYGMDVW

SEQ ID NO: 54469 - protein, 23 aa, Homo sapiens
CARDFGYCSSTSCYLYYYGMDVW

SEQ ID NO: 54470 - protein, 25 aa, Homo sapiens
CTTLTIFGVVTYLIPYYYYYYMDVW

SEQ ID NO: 54471 - protein, 26 aa, Homo sapiens
CARDISSIAAAGTRPRGYYYYGMDVW

SEQ ID NO: 54472 - protein, 17 aa, Homo sapiens
CAREGRGIVIVPALDYW

SEQ ID NO: 54473 - protein, 19 aa, Homo sapiens
CARGRFLEPLWVAYYFDYW

SEQ ID NO: 54474 - protein, 18 aa, Homo sapiens
CTRISGYADYYYYGMDVW

SEQ ID NO: 54475 - protein, 16 aa, Homo sapiens
CARASSGYDDWYFDLW

SEQ ID NO: 54476 - protein, 21 aa, Homo sapiens
CARDSNDFWTGYYWPYYFDYW

SEQ ID NO: 54477 - protein, 22 aa, Homo sapiens
CARSPYCSGGSCYAYYYYMDVW

SEQ ID NO: 54478 - protein, 17 aa, Homo sapiens
CARGDNSGYDLSWFDPW

SEQ ID NO: 54479 - protein, 17 aa, Homo sapiens
CAREFWPTRWTNGFDIW

SEQ ID NO: 54480 - protein, 20 aa, Homo sapiens
CARALSYYYGSGSEYRFDYW

SEQ ID NO: 54481 - protein, 15 aa, Homo sapiens
CARGSNGDYFLFDYW

SEQ ID NO: 54482 - protein, 24 aa, Homo sapiens
CGAWGITMVQGVIWGDYYYGMDVW

SEQ ID NO: 54483 - protein, 20 aa, Homo sapiens
CAHSQFHSSGYYGSYYFDYW

SEQ ID NO: 54484 - protein, 16 aa, Homo sapiens
CAHRPPGYSGSYFDYW

SEQ ID NO: 54485 - protein, 20 aa, Homo sapiens
CATFDKSYHRYYYYYYMDVW

SEQ ID NO: 54486 - protein, 19 aa, Homo sapiens
CARDPLRYSTSSTWYFDYW

SEQ ID NO: 54487 - protein, 18 aa, Homo sapiens
CAREGDPAVAGGLYFDYW

SEQ ID NO: 54488 - protein, 24 aa, Homo sapiens
CARDLGAGIVVVPAATPGPYFDYW

SEQ ID NO: 54489 - protein, 21 aa, Homo sapiens
CAHRGYNWNYVMAPTNAFDIW

SEQ ID NO: 54490 - protein, 16 aa, Homo sapiens
CARDGEFGDQYEGDYW

SEQ ID NO: 54491 - protein, 17 aa, Homo sapiens
CAALYGSGSSGYPIDYW

SEQ ID NO: 54492 - protein, 18 aa, Homo sapiens
CTRVNEVVPAANNWFDPW

SEQ ID NO: 54493 - protein, 26 aa, Homo sapiens
CARGGTSHLEWLFSSASYYYYGMDVW

SEQ ID NO: 54494 - protein, 19 aa, Homo sapiens
CAREGDDYIWGSYHAFDIW

SEQ ID NO: 54495 - protein, 14 aa, Homo sapiens
CAKLPLESGYVDYW

SEQ ID NO: 54496 - protein, 20 aa, Homo sapiens
CARVRSDFWSGLTSGWFDPW

SEQ ID NO: 54497 - protein, 17 aa, Homo sapiens
CAHRRRTVVVATVFDYW

SEQ ID NO: 54498 - protein, 23 aa, Homo sapiens
CARWRVTYYYDSSGYYPDAFDIW

SEQ ID NO: 54499 - protein, 19 aa, Homo sapiens
CARMIYFDWLAESGYPDYW

SEQ ID NO: 54500 - protein, 22 aa, Homo sapiens
CARLATVTTAYFSYYYYGMDVW

SEQ ID NO: 54501 - protein, 17 aa, Homo sapiens
CASWSSYDYIWGSDDYW

SEQ ID NO: 54502 - protein, 18 aa, Homo sapiens
CASHLGYGDYDVPNFDYW

SEQ ID NO: 54503 - protein, 23 aa, Homo sapiens
CARVPTYDYIWGSYMSDYYMDVW

SEQ ID NO: 54504 - protein, 16 aa, Homo sapiens
CARVIAVRQLAYFDYW

SEQ ID NO: 54505 - protein, 17 aa, Homo sapiens
CARSENYYDSNDAFDYW

SEQ ID NO: 54506 - protein, 17 aa, Homo sapiens
CARDGLFDSGSYPLDYW

SEQ ID NO: 54507 - protein, 19 aa, Homo sapiens
CARGGITIFGVVLISFDYW

SEQ ID NO: 54508 - protein, 19 aa, Homo sapiens
CARSTPWGSGWYLGWFDPW

SEQ ID NO: 54509 - protein, 17 aa, Homo sapiens
CARVVTIFGEDYYMDVW

SEQ ID NO: 54510 - protein, 22 aa, Homo sapiens
CARSASGAMIVSEATGDWFDPW

SEQ ID NO: 54511 - protein, 25 aa, Homo sapiens
CTREWGEYDYIWGSYRYKTNLWDYW

SEQ ID NO: 54512 - protein, 15 aa, Homo sapiens
CARLPTGTTSPFDYW

SEQ ID NO: 54513 - protein, 16 aa, Homo sapiens
CVAGLESGSSSVLDYW

SEQ ID NO: 54514 - protein, 19 aa, Homo sapiens
CARALYSSGYSNYYYMDVW

SEQ ID NO: 54515 - protein, 21 aa, Homo sapiens
CAHYSTSYSSSWYYINWFDPW

SEQ ID NO: 54516 - protein, 18 aa, Homo sapiens
CARAHVVASAWYEGFDYW

SEQ ID NO: 54517 - protein, 16 aa, Homo sapiens
CAKDPGTGTTLGFDYW

SEQ ID NO: 54518 - protein, 21 aa, Homo sapiens
CAKEGGDLRFLYYYYYYMDVW

SEQ ID NO: 54519 - protein, 25 aa, Homo sapiens
CAREGGTYYDFWCGYYGRGDGFDPW

SEQ ID NO: 54520 - protein, 18 aa, Homo sapiens
CARDQRRGGYNTLSVDYW

SEQ ID NO: 54521 - protein, 21 aa, Homo sapiens
CARDDGRITIFGVPQGWFDPW

SEQ ID NO: 54522 - protein, 23 aa, Homo sapiens
CAKVLEKRYYDILTGYSSPLDYW

SEQ ID NO: 54523 - protein, 16 aa, Homo sapiens
CAHRGEWDLGGAFDYW

SEQ ID NO: 54524 - protein, 13 aa, Homo sapiens
CAKLTQQLGTDYW

SEQ ID NO: 54525 - protein, 17 aa, Homo sapiens
CARISGVATITEWFDPW

SEQ ID NO: 54526 - protein, 21 aa, Homo sapiens
CARDRWDDFWSGYYGDAFDIW

SEQ ID NO: 54527 - protein, 19 aa, Homo sapiens
CARAPPHYDSSGYYPFDYW

SEQ ID NO: 54528 - protein, 22 aa, Homo sapiens
CARDPNYYYGSGSPGGNWFDPW

SEQ ID NO: 54529 - protein, 24 aa, Homo sapiens
CARSQADYDYIWGSYRYTGIFDYW

SEQ ID NO: 54530 - protein, 17 aa, Homo sapiens
CAREADWLRLNWYFDLW

SEQ ID NO: 54531 - protein, 17 aa, Homo sapiens
CAKLGGIRFLEGEADYW

SEQ ID NO: 54532 - protein, 19 aa, Homo sapiens
CARTNYDILTGYLEYFQHW

SEQ ID NO: 54533 - protein, 16 aa, Homo sapiens
CASSEQWLGEYAFDIW

SEQ ID NO: 54534 - protein, 22 aa, Homo sapiens
CARDMRPWWLRGGQYYYGMDVW

SEQ ID NO: 54535 - protein, 20 aa, Homo sapiens
CVRGPSFYGDKGRKVAFDIW

SEQ ID NO: 54536 - protein, 21 aa, Homo sapiens
CARDPPPCSGGSCFYNWFDPW

SEQ ID NO: 54537 - protein, 19 aa, Homo sapiens
CACLGGYSGYDWGLISDYW

SEQ ID NO: 54538 - protein, 19 aa, Homo sapiens
CAREMRGAWWLRSEGYDYW

SEQ ID NO: 54539 - protein, 20 aa, Homo sapiens
CATDNPRVGATRPYDAFDIW

SEQ ID NO: 54540 - protein, 19 aa, Homo sapiens
CAKSGPLEFLYYYYSMDVW

SEQ ID NO: 54541 - protein, 18 aa, Homo sapiens
CARHGMANYGDYEAFDIW

SEQ ID NO: 54542 - protein, 15 aa, Homo sapiens
CAKVNGAVGPGFDYW

SEQ ID NO: 54543 - protein, 20 aa, Homo sapiens
CARDEMENFGIAAAGLFDYW

SEQ ID NO: 54544 - protein, 21 aa, Homo sapiens
CASGEYSSSWYQYYYYYMDVW

SEQ ID NO: 54545 - protein, 20 aa, Homo sapiens
CARTTRITMAKGFIPFFDYW

SEQ ID NO: 54546 - protein, 14 aa, Homo sapiens
CAHTEGIFGAFDIW

SEQ ID NO: 54547 - protein, 20 aa, Homo sapiens
CAHRRPLYYYDSSGYRFDYW

SEQ ID NO: 54548 - protein, 19 aa, Homo sapiens
CARENDLPLALYYYYMDVW

SEQ ID NO: 54549 - protein, 13 aa, Homo sapiens
CAGTPIQDWFGPW

SEQ ID NO: 54550 - protein, 18 aa, Homo sapiens
CARARYSSLDYYYYMDVW

SEQ ID NO: 54551 - protein, 14 aa, Homo sapiens
CASAWELEDAFDIW

SEQ ID NO: 54552 - protein, 16 aa, Homo sapiens
CARDGSQPAVPFWDYW

SEQ ID NO: 54553 - protein, 24 aa, Homo sapiens
CAKDGLTYYDFWSGYYTSQEFDYW

SEQ ID NO: 54554 - protein, 20 aa, Homo sapiens
CARDLLGKSGRGYYYGMDVW

SEQ ID NO: 54555 - protein, 16 aa, Homo sapiens
CATDSATYSGSYYDYW

SEQ ID NO: 54556 - protein, 19 aa, Homo sapiens
CARDPGGWDFWSGYHFDYW

SEQ ID NO: 54557 - protein, 23 aa, Homo sapiens
CAKDGYVGELRFLEWLLTFPDYW

SEQ ID NO: 54558 - protein, 23 aa, Homo sapiens
CARTRTVTFWNLGDWYYYGMDVW

SEQ ID NO: 54559 - protein, 18 aa, Homo sapiens
CARDRVGQWLLLYWFDPW

SEQ ID NO: 54560 - protein, 21 aa, Homo sapiens
CARVSRLDYGDYWGGYYFDYW

SEQ ID NO: 54561 - protein, 19 aa, Homo sapiens
CARDRGFDYGPYYYGMDVW

SEQ ID NO: 54562 - protein, 28 aa, Homo sapiens
CARVCPKHDAIAAVLSANYYYYYGMDVW

SEQ ID NO: 54563 - protein, 18 aa, Homo sapiens
CATGYSSGWSRDDAFDIW

SEQ ID NO: 54564 - protein, 22 aa, Homo sapiens
CARAGYCSGGSCYYYYYGMDVW

SEQ ID NO: 54565 - protein, 24 aa, Homo sapiens
CARDGKMYYYDSSGYYRHDYFDYW

SEQ ID NO: 54566 - protein, 16 aa, Homo sapiens
CARGGYSTILFPFDSW

SEQ ID NO: 54567 - protein, 18 aa, Homo sapiens
CARADSGSYFRFGAFDIW

SEQ ID NO: 54568 - protein, 19 aa, Homo sapiens
CARTHDYDSSGYYAVFDHW

SEQ ID NO: 54569 - protein, 16 aa, Homo sapiens
CARTALYSGSYYYDFW

SEQ ID NO: 54570 - protein, 21 aa, Homo sapiens
CARTPEVPLRGNYYYYGMDVW

SEQ ID NO: 54571 - protein, 18 aa, Homo sapiens
CARDLFHNYDIVNGFDYW

SEQ ID NO: 54572 - protein, 12 aa, Homo sapiens
CARSTVVPMDYW

SEQ ID NO: 54573 - protein, 23 aa, Homo sapiens
CARHAARGITIFGVPEVWWFDPW

SEQ ID NO: 54574 - protein, 22 aa, Homo sapiens
CARAKAHIVVVPAETRGDFDYW

SEQ ID NO: 54575 - protein, 19 aa, Homo sapiens
CARDTPYCGGDCYPFVDYW

SEQ ID NO: 54576 - protein, 16 aa, Homo sapiens
CASSSTYGDYLPNDYW

SEQ ID NO: 54577 - protein, 16 aa, Homo sapiens
CARSRGFDWLFSIDYW

SEQ ID NO: 54578 - protein, 13 aa, Homo sapiens
CAHTVHSNYLDYW

SEQ ID NO: 54579 - protein, 20 aa, Homo sapiens
CARSPGDSSGYYSPDAFDIW

SEQ ID NO: 54580 - protein, 20 aa, Homo sapiens
CARDSTVITFGGVIVPLDYW

SEQ ID NO: 54581 - protein, 15 aa, Homo sapiens
CARDQSQSEDHFDYW

SEQ ID NO: 54582 - protein, 17 aa, Homo sapiens
CARDRDWNYPAVNFDYW

SEQ ID NO: 54583 - protein, 19 aa, Homo sapiens
CASGGYCSGGSCYHQFDYW

SEQ ID NO: 54584 - protein, 25 aa, Homo sapiens
CARENRDFACRSGDCNFQIDAFDIW

SEQ ID NO: 54585 - protein, 16 aa, Homo sapiens
CVRVGWTSIGWDFDLW

SEQ ID NO: 54586 - protein, 17 aa, Homo sapiens
CAKYVGGSGWSGAFDVW

SEQ ID NO: 54587 - protein, 16 aa, Homo sapiens
CARDHYGDYINWFDPW

SEQ ID NO: 54588 - protein, 19 aa, Homo sapiens
CTTDLYYDFWSGYYLPDYW

SEQ ID NO: 54589 - protein, 16 aa, Homo sapiens
CARDLGYISGYDFDYW

SEQ ID NO: 54590 - protein, 23 aa, Homo sapiens
CAREGPPERLHLGELWDPIFDYW

SEQ ID NO: 54591 - protein, 20 aa, Homo sapiens
CARAFPEDTGPYYYYYMDVW

SEQ ID NO: 54592 - protein, 20 aa, Homo sapiens
CATDCPYYDILTGYCPFDYW

SEQ ID NO: 54593 - protein, 17 aa, Homo sapiens
CARIVPDYYSPYHFDYW

SEQ ID NO: 54594 - protein, 20 aa, Homo sapiens
CARAVLVPAARSHAKYFDSW

SEQ ID NO: 54595 - protein, 19 aa, Homo sapiens
CARDGNSKWLVGYYYMDVW

SEQ ID NO: 54596 - protein, 17 aa, Homo sapiens
CATIYAVAGREYYFDYW

SEQ ID NO: 54597 - protein, 14 aa, Homo sapiens
CARGGGRSTWFDPW

SEQ ID NO: 54598 - protein, 17 aa, Homo sapiens
CARDLSGYDEFEYFQHW

SEQ ID NO: 54599 - protein, 27 aa, Homo sapiens
CARGSRGYYDSSGYYRFGWDEDAFDIW

SEQ ID NO: 54600 - protein, 19 aa, Homo sapiens
CASGERDTAMVFNYYMDVW

SEQ ID NO: 54601 - protein, 21 aa, Homo sapiens
CARLEGSAAAGKSLGDWFDPW

SEQ ID NO: 54602 - protein, 15 aa, Homo sapiens
CAAWDDTLNGPGYVF

SEQ ID NO: 54603 - protein, 17 aa, Homo sapiens
CASTLNYYDSSGEGDYW

SEQ ID NO: 54604 - protein, 16 aa, Homo sapiens
CARHAGQLVDYYFDYW

SEQ ID NO: 54605 - protein, 18 aa, Homo sapiens
CAKLGLYDYGHQYPTDYW

SEQ ID NO: 54606 - protein, 14 aa, Homo sapiens
CASDYGGPRYFDLW

SEQ ID NO: 54607 - protein, 37 aa, Homo sapiens
CALPISADTAVYYCARHLRQCSGGICQTYYYYAMDVW

SEQ ID NO: 54608 - protein, 17 aa, Homo sapiens
CAKMTEYSSFEEYFDLW

SEQ ID NO: 54609 - protein, 13 aa, Homo sapiens
CSSTSCYPWFDPW

SEQ ID NO: 54610 - protein, 13 aa, Homo sapiens
CAGRSNEGSFDYW

SEQ ID NO: 54611 - protein, 14 aa, Homo sapiens
CAREQQLVTAFDYW

SEQ ID NO: 54612 - protein, 23 aa, Homo sapiens
CARHGPPNYDFWSGYHSYYFDYW

SEQ ID NO: 54613 - protein, 17 aa, Homo sapiens
CAKDSSGYYSESWFDPW

SEQ ID NO: 54614 - protein, 27 aa, Homo sapiens
CARDRTPIDPLSTIFGVVPSCDGMDVW

SEQ ID NO: 54615 - protein, 14 aa, Homo sapiens
CMQGTHGTPPTLTF

SEQ ID NO: 54616 - protein, 18 aa, Homo sapiens
CAKDEHITIFEGVAFDYW

SEQ ID NO: 54617 - protein, 22 aa, Homo sapiens
CASLITANIAVAGTPDYYFDYW

SEQ ID NO: 54618 - protein, 21 aa, Homo sapiens
CARSIMISFGGIIVINYFDYW

SEQ ID NO: 54619 - protein, 20 aa, Homo sapiens
CARDHCSGGSCFLDWYFDLW

SEQ ID NO: 54620 - protein, 19 aa, Homo sapiens
CARHVGYFDWLFTNWFDPW

SEQ ID NO: 54621 - protein, 19 aa, Homo sapiens
CARDRSVTGGWGDDAFNIW

SEQ ID NO: 54622 - protein, 27 aa, Homo sapiens
CAREAYYYDSSGYYHTAFLRNTAFDYW

SEQ ID NO: 54623 - protein, 19 aa, Homo sapiens
CAKGYSDGEQWLINWFDPW

SEQ ID NO: 54624 - protein, 20 aa, Homo sapiens
CARVGPCGDYDILTCPLDYW

SEQ ID NO: 54625 - protein, 16 aa, Homo sapiens
CTRDRGPVGAGEIDYW

SEQ ID NO: 54626 - protein, 15 aa, Homo sapiens
CAKDCVSGWYTFDYW

SEQ ID NO: 54627 - protein, 17 aa, Homo sapiens
CARDFVGSGWYPNFDYW

SEQ ID NO: 54628 - protein, 19 aa, Homo sapiens
CAKPTVTTSGDIYWYFDLW

SEQ ID NO: 54629 - protein, 22 aa, Homo sapiens
CARGQEAYDFWSGYYSAWFDPW

SEQ ID NO: 54630 - protein, 19 aa, Homo sapiens
CASDASCTGGICYGGADYW

SEQ ID NO: 54631 - protein, 14 aa, Homo sapiens
CFSSDSSGNRGGVF

SEQ ID NO: 54632 - protein, 14 aa, Homo sapiens
CTRVGQQAEAFDIW

SEQ ID NO: 54633 - protein, 23 aa, Homo sapiens
CARDGPYYYDSSGHPGGWYFDLW

SEQ ID NO: 54634 - protein, 21 aa, Homo sapiens
CAREDYYDSSGYYYYYGMDVW

SEQ ID NO: 54635 - protein, 16 aa, Homo sapiens
CARSGGGNYAGFFDFW

SEQ ID NO: 54636 - protein, 21 aa, Homo sapiens
CATSGHCSGGICYSSFYMDVW

SEQ ID NO: 54637 - protein, 25 aa, Homo sapiens
CARAEGDDYIWGMTFINGHGLFDYW

SEQ ID NO: 54638 - protein, 24 aa, Homo sapiens
CARGADFWSGLITGGYYYYGMDVW

SEQ ID NO: 54639 - protein, 19 aa, Homo sapiens
CARDPHGYANGPHDAFDIW

SEQ ID NO: 54640 - protein, 14 aa, Homo sapiens
CARDRYYAYYFDHW

SEQ ID NO: 54641 - protein, 19 aa, Homo sapiens
CARDRCSGGHCQLNSFDIW

SEQ ID NO: 54642 - protein, 18 aa, Homo sapiens
CAHSPDFDWLFGWYFDYW

SEQ ID NO: 54643 - protein, 19 aa, Homo sapiens
CARVAPDPISSGWYPFDYW

SEQ ID NO: 54644 - protein, 13 aa, Homo sapiens
CVREARPMYFDLW

SEQ ID NO: 54645 - protein, 19 aa, Homo sapiens
CATSGDSSSFYYYYGMDVW

SEQ ID NO: 54646 - protein, 18 aa, Homo sapiens
CARGLGAGDYYYYYMDVW

SEQ ID NO: 54647 - protein, 16 aa, Homo sapiens
CAHLPVTHRGYNFDFW

SEQ ID NO: 54648 - protein, 23 aa, Homo sapiens
CARDWVDYDYIWGSYRYKEFDYW

SEQ ID NO: 54649 - protein, 20 aa, Homo sapiens
CARHLRPYTSSWYYYGMDVW

SEQ ID NO: 54650 - protein, 22 aa, Homo sapiens
CARENDDFRSGFFSSVNWFDPW

SEQ ID NO: 54651 - protein, 23 aa, Homo sapiens
CARVSRGYYYDVNDYYPYYFDSW

SEQ ID NO: 54652 - protein, 17 aa, Homo sapiens
CAQGGYSGAGWYPFDHW

SEQ ID NO: 54653 - protein, 22 aa, Homo sapiens
CASETTPYYDILTGSFRSFDYW

SEQ ID NO: 54654 - protein, 21 aa, Homo sapiens
CARGLPLRFLYKYYYYGMDVW

SEQ ID NO: 54655 - protein, 15 aa, Homo sapiens
CARITIFGGDAFDIW

SEQ ID NO: 54656 - protein, 18 aa, Homo sapiens
CARARITMIVVVDAFDIW

SEQ ID NO: 54657 - protein, 18 aa, Homo sapiens
CAKDRIATRAKGFYFDYW

SEQ ID NO: 54658 - protein, 19 aa, Homo sapiens
CAKEAGGGRLVGYSYMDVW

SEQ ID NO: 54659 - protein, 17 aa, Homo sapiens
CARDIGIAVALSAFDIW

SEQ ID NO: 54660 - protein, 24 aa, Homo sapiens
CARLGYYDFWSGGDYYYYYGMDVW

SEQ ID NO: 54661 - protein, 17 aa, Homo sapiens
CASFWYYDDYGSPLDYW

SEQ ID NO: 54662 - protein, 16 aa, Homo sapiens
CAHRLVVPAANAFDIW

SEQ ID NO: 54663 - protein, 15 aa, Homo sapiens
CASSRDFDWLLYFYW

SEQ ID NO: 54664 - protein, 17 aa, Homo sapiens
CARHRTDYAGKPYFDFW

SEQ ID NO: 54665 - protein, 19 aa, Homo sapiens
CARAYSSGYYPLALHFDFW

SEQ ID NO: 54666 - protein, 18 aa, Homo sapiens
CARDPSRSSGYYYDFDYW

SEQ ID NO: 54667 - protein, 14 aa, Homo sapiens
CARVLPNYDHFDYW

SEQ ID NO: 54668 - protein, 18 aa, Homo sapiens
CARILRQLWLLGGYFDYW

SEQ ID NO: 54669 - protein, 20 aa, Homo sapiens
CATTPGSAARYYSYYYMDVW

SEQ ID NO: 54670 - protein, 17 aa, Homo sapiens
CASTFPTAAGVNWFDPW

SEQ ID NO: 54671 - protein, 23 aa, Homo sapiens
CARALSPYYDILTGYYPPYFDYW

SEQ ID NO: 54672 - protein, 18 aa, Homo sapiens
CQQYYSTPPAGLITPSNF

SEQ ID NO: 54673 - protein, 22 aa, Homo sapiens
CARGDSGGGARRLRYTGYFDLW

SEQ ID NO: 54674 - protein, 16 aa, Homo sapiens
CARGVRGGGTYVFDYW

SEQ ID NO: 54675 - protein, 16 aa, Homo sapiens
CARVGYYYDIEFFDYW

SEQ ID NO: 54676 - protein, 17 aa, Homo sapiens
CARSYNWNYFNNWFDPW

SEQ ID NO: 54677 - protein, 27 aa, Homo sapiens
CARGTYYDFWSGYYTGGPSYYYYMDVW

SEQ ID NO: 54678 - protein, 17 aa, Homo sapiens
CVRWDYGEYRGRVFDFW

SEQ ID NO: 54679 - protein, 21 aa, Homo sapiens
CARSTIATYDYGDYLVAFDIW

SEQ ID NO: 54680 - protein, 19 aa, Homo sapiens
CASRTYYYDSSGYYYLPYW

SEQ ID NO: 54681 - protein, 20 aa, Homo sapiens
CARLEYDGGNSFRPPPFDYW

SEQ ID NO: 54682 - protein, 19 aa, Homo sapiens
CARHTNSRDGYNLWYFDYW

SEQ ID NO: 54683 - protein, 20 aa, Homo sapiens
CARAGNSIPAYYYYYYMDVW

SEQ ID NO: 54684 - protein, 23 aa, Homo sapiens
CARLALEADVVVPAAIAGWFDPW

SEQ ID NO: 54685 - protein, 17 aa, Homo sapiens
CARDKISSGWYPYFDYW

SEQ ID NO: 54686 - protein, 19 aa, Homo sapiens
CARGRELIYDSGSYALDYW

SEQ ID NO: 54687 - protein, 17 aa, Homo sapiens
CSREMSSTWQNDAFDIW

SEQ ID NO: 54688 - protein, 23 aa, Homo sapiens
CARHAPGGGYSYGFGEPSAFDIW

SEQ ID NO: 54689 - protein, 17 aa, Homo sapiens
CATLTIWSGYYDPFDYW

SEQ ID NO: 54690 - protein, 16 aa, Homo sapiens
CARVGGGDTPDWFDPW

SEQ ID NO: 54691 - protein, 22 aa, Homo sapiens
CARDGGTYFRGSGSLVYWFDPW

SEQ ID NO: 54692 - protein, 16 aa, Homo sapiens
CAKGGYYLEDYNFDYW

SEQ ID NO: 54693 - protein, 16 aa, Homo sapiens
CARLLGGAKFLNFDYW

SEQ ID NO: 54694 - protein, 24 aa, Homo sapiens
CARGGISTIFGVVISPANYYFDYW

SEQ ID NO: 54695 - protein, 23 aa, Homo sapiens
CARDGWYYGSGSNGYYYYGMDVW

SEQ ID NO: 54696 - protein, 18 aa, Homo sapiens
CARHEECSGGSCHLIDYW

SEQ ID NO: 54697 - protein, 22 aa, Homo sapiens
CATGHYDFWSGYFAARNWFDPW

SEQ ID NO: 54698 - protein, 22 aa, Homo sapiens
CARDYRQQLETYGPEVGWFDPW

SEQ ID NO: 54699 - protein, 14 aa, Homo sapiens
CATAPNWNYPFDYW

SEQ ID NO: 54700 - protein, 19 aa, Homo sapiens
CASQPTQDYGIGVWYFDLW

SEQ ID NO: 54701 - protein, 21 aa, Homo sapiens
CATRPLVVPAAFDYYYYMDVW

SEQ ID NO: 54702 - protein, 18 aa, Homo sapiens
CVRGPLSDSSGYYPFGYW

SEQ ID NO: 54703 - protein, 22 aa, Homo sapiens
CARNLVVPADPLNYYYYGMDVW

SEQ ID NO: 54704 - protein, 23 aa, Homo sapiens
CARGGWGVPAAIPPYYYYGMDVW

SEQ ID NO: 54705 - protein, 16 aa, Homo sapiens
CARILFCGWSNWFDPW

SEQ ID NO: 54706 - protein, 20 aa, Homo sapiens
CATNSGSYPGGWEPGTFDVW

SEQ ID NO: 54707 - protein, 19 aa, Homo sapiens
CARTLTYGDYERIDWFDPW

SEQ ID NO: 54708 - protein, 21 aa, Homo sapiens
CARGLTYYYGSGSYSQWFDPW

SEQ ID NO: 54709 - protein, 23 aa, Homo sapiens
CARAAGYCSGGSCLVGGGWFDPW

SEQ ID NO: 54710 - protein, 21 aa, Homo sapiens
CAREPPKYDFWSGLDNWFDPW

SEQ ID NO: 54711 - protein, 29 aa, Homo sapiens
CARTAVGVPKKHYDFWSGYVYYYYGMDVW

SEQ ID NO: 54712 - protein, 28 aa, Homo sapiens
CARHKTSDYDFWSGTNPRPEPNWYFDLW

SEQ ID NO: 54713 - protein, 18 aa, Homo sapiens
CAKLTLGHQLPTYYFDYW

SEQ ID NO: 54714 - protein, 21 aa, Homo sapiens
CAGSTGTTGGGYYYYYYMDVW

SEQ ID NO: 54715 - protein, 22 aa, Homo sapiens
CARSPSGTIFGVVITWVYFDYW

SEQ ID NO: 54716 - protein, 16 aa, Homo sapiens
CAHRRVVPAASYFDYW

SEQ ID NO: 54717 - protein, 13 aa, Homo sapiens
CARHIVATIVDYW

SEQ ID NO: 54718 - protein, 24 aa, Homo sapiens
CARPNRPYYDYIWGSYRQSGLDYW

SEQ ID NO: 54719 - protein, 19 aa, Homo sapiens
CAREVEMATIPAPRYFDLW

SEQ ID NO: 54720 - protein, 20 aa, Homo sapiens
CASGLGSNSPGAYYYYMDVW

SEQ ID NO: 54721 - protein, 23 aa, Homo sapiens
CARHGPYYYDSSGYSRFNAFDIW

SEQ ID NO: 54722 - protein, 17 aa, Homo sapiens
CGIQPYRGANRGDFDYW

SEQ ID NO: 54723 - protein, 19 aa, Homo sapiens
CAKDIIPIAVAGMSYYDYW

SEQ ID NO: 54724 - protein, 17 aa, Homo sapiens
CARWDGVPAGNNWFDPW

SEQ ID NO: 54725 - protein, 17 aa, Homo sapiens
CARDSAGGYYDDYDDVW

SEQ ID NO: 54726 - protein, 13 aa, Homo sapiens [sequence omitted]

SEQ ID NO: 54727 - protein, 23 aa, Homo sapiens
CARSRSWGGYDILTGYYLDFDYW

SEQ ID NO: 54728 - protein, 22 aa, Homo sapiens
CATAIPDDYGDYVRPGDAFDIW

SEQ ID NO: 54729 - protein, 21 aa, Homo sapiens
CARQFKGYCSGGSCLNGFDPW

SEQ ID NO: 54730 - protein, 13 aa, Homo sapiens
CARIRAGGTFDYW

SEQ ID NO: 54731 - protein, 15 aa, Homo sapiens
CATDNRGTGERFDPW

SEQ ID NO: 54732 - protein, 19 aa, Homo sapiens
CARDFQLDRDLLEGWFDPW

SEQ ID NO: 54733 - protein, 18 aa, Homo sapiens
CVRAPTTVVGGSGYFDYW

SEQ ID NO: 54734 - protein, 23 aa, Homo sapiens
CATHSRTIFGVVITPGELGLDYW

SEQ ID NO: 54735 - protein, 17 aa, Homo sapiens
CARDRNYDFLYWYFDLW

SEQ ID NO: 54736 - protein, 16 aa, Homo sapiens
CARDYDILTGYYFDYW

SEQ ID NO: 54737 - protein, 22 aa, Homo sapiens
CTRDPVETYYDFWSGYTPPDYW

SEQ ID NO: 54738 - protein, 21 aa, Homo sapiens
CARDHRFIVGAAAQPAYFDYW

SEQ ID NO: 54739 - protein, 20 aa, Homo sapiens
CARDYEGSGSYFHYYYMDVW

SEQ ID NO: 54740 - protein, 18 aa, Homo sapiens
CARGTTVTTWDYNWFDPW

SEQ ID NO: 54741 - protein, 20 aa, Homo sapiens
CARIPYDFWSGYYIGGFDYW

SEQ ID NO: 54742 - protein, 16 aa, Homo sapiens
CASQITIFGGLAMDVW

SEQ ID NO: 54743 - protein, 18 aa, Homo sapiens
CARRVYCSGGSCFEFDNW

SEQ ID NO: 54744 - protein, 22 aa, Homo sapiens
CARGNVEMATIFGVFTYYFDYW

SEQ ID NO: 54745 - protein, 27 aa, Homo sapiens
CARGGGYDERIMITFGGVIRASLIDYW

SEQ ID NO: 54746 - protein, 32 aa, Homo sapiens
CAKDLGEMYYDFWSGYYAGDLGGYYYYGMDVW

SEQ ID NO: 54747 - protein, 20 aa, Homo sapiens
CAHIMITYGGVTRDDAFDVW

SEQ ID NO: 54748 - protein, 16 aa, Homo sapiens
CARDSVGVIGLGVDYW

SEQ ID NO: 54749 - protein, 18 aa, Homo sapiens
CARVTFGPAYSYFYMDVW

SEQ ID NO: 54750 - protein, 20 aa, Homo sapiens
CAREEITMVQGVNYYYMDVW

SEQ ID NO: 54751 - protein, 18 aa, Homo sapiens
CAREGRTTVSTKGLFDYW

SEQ ID NO: 54752 - protein, 16 aa, Homo sapiens
CAHRRVVITSGWFDPW

SEQ ID NO: 54753 - protein, 20 aa, Homo sapiens
CTRTWYGDYPEGWYYYMDVW

SEQ ID NO: 54754 - protein, 19 aa, Homo sapiens
CAKDIYDYSFLHKDAFDIW

SEQ ID NO: 54755 - protein, 23 aa, Homo sapiens
CAKGGGRYDFWSGYYYYYGMDVW

SEQ ID NO: 54756 - protein, 17 aa, Homo sapiens
CTRDPDCTGGVCPFDYW

SEQ ID NO: 54757 - protein, 13 aa, Homo sapiens
CTPNAREDYFDYW

SEQ ID NO: 54758 - protein, 15 aa, Homo sapiens
CVREMMGATPYFDYW

SEQ ID NO: 54759 - protein, 20 aa, Homo sapiens
CARVGDYYDSSGSEYYFDYW

SEQ ID NO: 54760 - protein, 19 aa, Homo sapiens
CARRGDDFWSGYYTGFDYW

SEQ ID NO: 54761 - protein, 27 aa, Homo sapiens
CARDLFPAPGITGTRELRRVPSPFDYW

SEQ ID NO: 54762 - protein, 18 aa, Homo sapiens
CARVGGEDSVVALYMDVW

SEQ ID NO: 54763 - protein, 24 aa, Homo sapiens
CARMFVGTTGPLGGYYYYYGMDVW

SEQ ID NO: 54764 - protein, 22 aa, Homo sapiens
CARDIYYDFWSGRDPTNWFDPW

SEQ ID NO: 54765 - protein, 13 aa, Homo sapiens
CAHYTAMVYFDYW

SEQ ID NO: 54766 - protein, 18 aa, Homo sapiens
CAGRVGGWSGYRDAFDIW

SEQ ID NO: 54767 - protein, 21 aa, Homo sapiens
CARHALGYCTGGVCESAFDIW

SEQ ID NO: 54768 - protein, 14 aa, Homo sapiens
CARQRLSGSYSDYW

SEQ ID NO: 54769 - protein, 14 aa, Homo sapiens
CARDSMGRKGMDYW

SEQ ID NO: 54770 - protein, 16 aa, Homo sapiens
CATDYSVRRSGYVGYW

SEQ ID NO: 54771 - protein, 20 aa, Homo sapiens
CATGPAVAGTDGHLRWFDPW

SEQ ID NO: 54772 - protein, 28 aa, Homo sapiens
CATLDPPTDYDYIWGSYRYRRSGWFDPW

SEQ ID NO: 54773 - protein, 11 aa, Homo sapiens
CPQSYSTPQPF

SEQ ID NO: 54774 - protein, 16 aa, Homo sapiens
CASARTDYGDYHIDYW

SEQ ID NO: 54775 - protein, 20 aa, Homo sapiens
CASPRSSMTQGLAIAVFDYW

SEQ ID NO: 54776 - protein, 20 aa, Homo sapiens
CARAGLYGSGSYSSDPFDYW

SEQ ID NO: 54777 - protein, 19 aa, Homo sapiens
CARHYSGYDLFYYYYMDVW

SEQ ID NO: 54778 - protein, 16 aa, Homo sapiens
CAKFPNSGYDFIRDYW

SEQ ID NO: 54779 - protein, 15 aa, Homo sapiens
CARDRYRSGLTIDYW

SEQ ID NO: 54780 - protein, 23 aa, Homo sapiens
CARTLTYYDYIWGSYRYGYFDYW

SEQ ID NO: 54781 - protein, 19 aa, Homo sapiens
CAKDLNCSGGDCLGYLEYW

SEQ ID NO: 54782 - protein, 17 aa, Homo sapiens
CARVTGDFWSGSWFDPW

SEQ ID NO: 54783 - protein, 15 aa, Homo sapiens
CARDSPFNYAWFDPW

SEQ ID NO: 54784 - protein, 17 aa, Homo sapiens
CAKDLGNDYGDYGPDYW

SEQ ID NO: 54785 - protein, 16 aa, Homo sapiens
CARGDHQGAADAFDIW

SEQ ID NO: 54786 - protein, 24 aa, Homo sapiens
CARGHRWYYYDSSGYYYGDYFDYW

SEQ ID NO: 54787 - protein, 19 aa, Homo sapiens
CARDPDPMVQGVYDAFDIW

SEQ ID NO: 54788 - protein, 20 aa, Homo sapiens
CARGRYSSSWYGPSGYFQHW

SEQ ID NO: 54789 - protein, 19 aa, Homo sapiens
CAKDLYYDFWSGYRSTDYW

SEQ ID NO: 54790 - protein, 19 aa, Homo sapiens
CARDKDPYDLYYYYGMDVW

SEQ ID NO: 54791 - protein, 27 aa, Homo sapiens
CAKDIFLDYDILTGYSRPYYYYGMDVW

SEQ ID NO: 54792 - protein, 14 aa, Homo sapiens
CATMRWEPRVFDYW

SEQ ID NO: 54793 - protein, 16 aa, Homo sapiens
CALTTPYSGSYWFDPW

SEQ ID NO: 54794 - protein, 15 aa, Homo sapiens
CARHDSITRDAFDIW

SEQ ID NO: 54795 - protein, 26 aa, Homo sapiens
CARHVLEGDYEQLDLEYYYYYYMDVW

SEQ ID NO: 54796 - protein, 16 aa, Homo sapiens
CARRGQRGATSPFDYW

SEQ ID NO: 54797 - protein, 18 aa, Homo sapiens
CVRPPVLIAIVGTRIDYW

SEQ ID NO: 54798 - protein, 20 aa, Homo sapiens
CATLGWSGSTGYYYYYMDVW

SEQ ID NO: 54799 - protein, 20 aa, Homo sapiens
CARHARDYDSSGYPYYFDYW

SEQ ID NO: 54800 - protein, 22 aa, Homo sapiens
CARADKPTAKIPWGYYYYMDVW

SEQ ID NO: 54801 - protein, 21 aa, Homo sapiens
CARLIADAGPPHYYYYGMDVW

SEQ ID NO: 54802 - protein, 18 aa, Homo sapiens
CARHDQEVSTSWYAPDYW

SEQ ID NO: 54803 - protein, 26 aa, Homo sapiens
CARDGVVYDILTGYYLYYYYYYMDVW

SEQ ID NO: 54804 - protein, 18 aa, Homo sapiens
CVRHASKTWPYYYYMDLW

SEQ ID NO: 54805 - protein, 22 aa, Homo sapiens
CARAPWDTIFGVVIIPRPFDYW

SEQ ID NO: 54806 - protein, 16 aa, Homo sapiens
CARIRCSSTSCYAYYW

SEQ ID NO: 54807 - protein, 19 aa, Homo sapiens
CARDFTRYYYDSSGYANYW

SEQ ID NO: 54808 - protein, 28 aa, Homo sapiens
CAAPQVHDFWSGYLAAGPDYYYYGMDVW

SEQ ID NO: 54809 - protein, 15 aa, Homo sapiens
CARGPDTAMVSFDYW

SEQ ID NO: 54810 - protein, 16 aa, Homo sapiens
CASPKGLYGDHGLDYW

SEQ ID NO: 54811 - protein, 39 aa, Homo sapiens
CTAYMELSSLRSEDTAVYYCARDPYDYIWGRPSNWFDPW

SEQ ID NO: 54812 - protein, 19 aa, Homo sapiens
CVRGGCGRGSCYSFYFDSW

SEQ ID NO: 54813 - protein, 17 aa, Homo sapiens
CAKDKGLIRDEYYFDYW

SEQ ID NO: 54814 - protein, 14 aa, Homo sapiens
CAGRDGVRGAFDIW

SEQ ID NO: 54815 - protein, 17 aa, Homo sapiens
CATGPVLSGTTGWFDPW

SEQ ID NO: 54816 - protein, 24 aa, Homo sapiens
CAKVWGNFWSRYSVFHTGHEFDVW

SEQ ID NO: 54817 - protein, 18 aa, Homo sapiens
CARRRRTKATELAHFDYW

SEQ ID NO: 54818 - protein, 17 aa, Homo sapiens
CAKDRSTVTSTPNFDNW

SEQ ID NO: 54819 - protein, 25 aa, Homo sapiens
CARSAATKDQDWLLFNYYYYYMDVW

SEQ ID NO: 54820 - protein, 20 aa, Homo sapiens
CARVYYDFWSGLGSDAFDIW

SEQ ID NO: 54821 - protein, 17 aa, Homo sapiens
CAKELLEWLLYGAFDIW

SEQ ID NO: 54822 - protein, 21 aa, Homo sapiens
CARSLMSNHYDSSGESHFDLW

SEQ ID NO: 54823 - protein, 21 aa, Homo sapiens
CARGRENYDFWSGYFYWFDPW

SEQ ID NO: 54824 - protein, 25 aa, Homo sapiens
CTRAVLRYFDWLFHADYYYYYMDVW

SEQ ID NO: 54825 - protein, 23 aa, Homo sapiens
CASSPVGRIRYFDWLFPAPPDYW

SEQ ID NO: 54826 - protein, 22 aa, Homo sapiens
CARSGAEPVAGYYYYYYYMDVW

SEQ ID NO: 54827 - protein, 16 aa, Homo sapiens
CAKGDASYYVDYFDYW

SEQ ID NO: 54828 - protein, 15 aa, Homo sapiens
CARILWFREPYFDYW

SEQ ID NO: 54829 - protein, 26 aa, Homo sapiens
CARDEKLCYYGSGSYLTCGLNWFDPW

SEQ ID NO: 54830 - protein, 16 aa, Homo sapiens
CARGIGFLESNWFDPW

SEQ ID NO: 54831 - protein, 19 aa, Homo sapiens
CATDNFDNSGYFHHQFDYW

SEQ ID NO: 54832 - protein, 18 aa, Homo sapiens
CATIHGYSGYDSVAFDIW

SEQ ID NO: 54833 - protein, 16 aa, Homo sapiens
CARGEFNPPAEHFQHW

SEQ ID NO: 54834 - protein, 22 aa, Homo sapiens
CARAAPITIFGVVTNHGYFDLW

SEQ ID NO: 54835 - protein, 19 aa, Homo sapiens
CAREPYDSSGYYYTASDYW

SEQ ID NO: 54836 - protein, 19 aa, Homo sapiens
CASSYGDYIYYYYYGMDVW

SEQ ID NO: 54837 - protein, 20 aa, Homo sapiens
CARVLRYFDWLFDSGYMDVW

SEQ ID NO: 54838 - protein, 15 aa, Homo sapiens
CARVKLSAYFSIDYW

SEQ ID NO: 54839 - protein, 20 aa, Homo sapiens
CATGPSYCTGGVCYRWFDPW

SEQ ID NO: 54840 - protein, 25 aa, Homo sapiens
CARELVVPADGTAGGSYYYYYMDVW

SEQ ID NO: 54841 - protein, 21 aa, Homo sapiens
CARASDYYDFWSGSHDAFDIW

SEQ ID NO: 54842 - protein, 20 aa, Homo sapiens
CARHDYYDFWSGYHAPGDYW

SEQ ID NO: 54843 - protein, 21 aa, Homo sapiens
CAHSHLSSSWYYGMDAYFDYW

SEQ ID NO: 54844 - protein, 25 aa, Homo sapiens
CARGRLGYCSGGSCYSGYYYGMDVW

SEQ ID NO: 54845 - protein, 23 aa, Homo sapiens
CARGSSSSWSFFHDYYYYGMDVW

SEQ ID NO: 54846 - protein, 20 aa, Homo sapiens
CARDISVPDDYGNRGWFDPW

SEQ ID NO: 54847 - protein, 21 aa, Homo sapiens
CARDAGRTIFGVVIYDAFDIW

SEQ ID NO: 54848 - protein, 16 aa, Homo sapiens
CARLPDYGDKNWFDPW

SEQ ID NO: 54849 - protein, 22 aa, Homo sapiens
CARGSFYGDYAISYYYYGMDVW

SEQ ID NO: 54850 - protein, 14 aa, Homo sapiens
CATLAAAGLPIDYW

SEQ ID NO: 54851 - protein, 15 aa, Homo sapiens
CASGLGGSYQVGDYW

SEQ ID NO: 54852 - protein, 21 aa, Homo sapiens
CATLGYCSGGSCSNYYYMDVW

SEQ ID NO: 54853 - protein, 21 aa, Homo sapiens
CARGAREGQWLGHGQYYFDYW

SEQ ID NO: 54854 - protein, 16 aa, Homo sapiens
CASNLNSGSYTPFDYW

SEQ ID NO: 54855 - protein, 15 aa, Homo sapiens
CAKDNAPTAEYFQHW

SEQ ID NO: 54856 - protein, 18 aa, Homo sapiens
CARDIGQATRWLDAFDIW

SEQ ID NO: 54857 - protein, 21 aa, Homo sapiens
CARSKGATYGYLYYHDGMDVW

SEQ ID NO: 54858 - protein, 16 aa, Homo sapiens
CARDPPDYGGNAFDIW

SEQ ID NO: 54859 - protein, 23 aa, Homo sapiens
CAREGGLRYFDWLLKAGNWLDPW

SEQ ID NO: 54860 - protein, 13 aa, Homo sapiens
CARLGPLRLFDPW

SEQ ID NO: 54861 - protein, 24 aa, Homo sapiens
CARGVGSSEGFFWQQLVGGYFDYW

SEQ ID NO: 54862 - protein, 24 aa, Homo sapiens
CAHSSVPAADGSEYYYYYYYMDVW

SEQ ID NO: 54863 - protein, 23 aa, Homo sapiens
CARDQVVTCTTTICRQGGGIDYW

SEQ ID NO: 54864 - protein, 18 aa, Homo sapiens
CARGWPTVVTLVDAFDIW

SEQ ID NO: 54865 - protein, 18 aa, Homo sapiens
CARQPHAGGSPASPFDYW

SEQ ID NO: 54866 - protein, 23 aa, Homo sapiens
CARGLGYCSTINQLLCQHWFDPW

SEQ ID NO: 54867 - protein, 17 aa, Homo sapiens
CARDFGFVFDSKELDYW

SEQ ID NO: 54868 - protein, 20 aa, Homo sapiens
CARKASGYGTYYYYYGMDVW

SEQ ID NO: 54869 - protein, 21 aa, Homo sapiens
CARVGGDNWNDKDPFYYFDYW

SEQ ID NO: 54870 - protein, 17 aa, Homo sapiens
CARDPGEGFLEWLFDYW

SEQ ID NO: 54871 - protein, 11 aa, Homo sapiens
CVTFGGVTDYW

SEQ ID NO: 54872 - protein, 16 aa, Homo sapiens
CATLSDVDIVAVVDYW

SEQ ID NO: 54873 - protein, 21 aa, Homo sapiens
CARENALLIAGRDEVSWIDPW

SEQ ID NO: 54874 - protein, 19 aa, Homo sapiens
CATKRSTMLQGPGNWFDPW

SEQ ID NO: 54875 - protein, 20 aa, Homo sapiens
CARMEIQLWPRYYYYGMDVW

SEQ ID NO: 54876 - protein, 19 aa, Homo sapiens
CARDTNDYIWGSYRLIDYW

SEQ ID NO: 54877 - protein, 17 aa, Homo sapiens
CARLMNDHFIYYYMDVW

SEQ ID NO: 54878 - protein, 18 aa, Homo sapiens
CAKLLDYYDSSGYLFVYW

SEQ ID NO: 54879 - protein, 22 aa, Homo sapiens
CARDPPKLYGDYDHDGYYFDYW

SEQ ID NO: 54880 - protein, 22 aa, Homo sapiens
CARTRTNSRGGWWYYYYAMDVW

SEQ ID NO: 54881 - protein, 23 aa, Homo sapiens
CARPVTLTVPAAKEYYFYYMDVW

SEQ ID NO: 54882 - protein, 15 aa, Homo sapiens
CARGAPSGTSFLDYW

SEQ ID NO: 54883 - protein, 17 aa, Homo sapiens
CARGYCFGGNCNTFDYW

SEQ ID NO: 54884 - protein, 22 aa, Homo sapiens
CARGGWRGTVVTPVYDNWFDPW

SEQ ID NO: 54885 - protein, 17 aa, Homo sapiens
CASTRGDGYMGQAFDIW

SEQ ID NO: 54886 - protein, 17 aa, Homo sapiens
CAHSASSGWYGEYFQHW

SEQ ID NO: 54887 - protein, 19 aa, Homo sapiens
CARDIPVLVYSGYDLVDYW

SEQ ID NO: 54888 - protein, 21 aa, Homo sapiens
CARDLNWCSGGSCYQALFDYW

SEQ ID NO: 54889 - protein, 16 aa, Homo sapiens
CARVFSVWYLAAFDIW

SEQ ID NO: 54890 - protein, 19 aa, Homo sapiens
CAVESEGGTDTHHNSVDYW

SEQ ID NO: 54891 - protein, 24 aa, Homo sapiens
CARDVGDGQQPPPLSDYYYGMDVW

SEQ ID NO: 54892 - protein, 19 aa, Homo sapiens
CARAAGDISGRGMGWFDPW

SEQ ID NO: 54893 - protein, 19 aa, Homo sapiens
CAHSVEIRFLEWLSWFDPW

SEQ ID NO: 54894 - protein, 26 aa, Homo sapiens
CAVTLEEYCSGGSCQRRHYYYGMDVW

SEQ ID NO: 54895 - protein, 17 aa, Homo sapiens
CARDDGNGYNPEIFDYW

SEQ ID NO: 54896 - protein, 19 aa, Homo sapiens
CANSGYDILGYYYYYMDVW

SEQ ID NO: 54897 - protein, 21 aa, Homo sapiens
CARGDVGLRYFDYSGDYFDYW

SEQ ID NO: 54898 - protein, 22 aa, Homo sapiens
CARNMYYYGSGSLYYYYYMDVW

SEQ ID NO: 54899 - protein, 17 aa, Homo sapiens
CATFFTFGGVSDAFDIW

SEQ ID NO: 54900 - protein, 14 aa, Homo sapiens
CARGMINYLGIDYW

SEQ ID NO: 54901 - protein, 19 aa, Homo sapiens
CARNPHDSSSWSAYYFDYW

SEQ ID NO: 54902 - protein, 23 aa, Homo sapiens
CARVNSNYDILTRSYYYYKMDVW

SEQ ID NO: 54903 - protein, 19 aa, Homo sapiens
CTKNYDFWSGYYTEDFDYW

SEQ ID NO: 54904 - protein, 24 aa, Homo sapiens
CAREGRGPTYYYDSSGPTAAFDIW

SEQ ID NO: 54905 - protein, 16 aa, Homo sapiens
CARWWSTSSYWYFDLW

SEQ ID NO: 54906 - protein, 18 aa, Homo sapiens
CTRGHCTGGVCYGNFDYW

SEQ ID NO: 54907 - protein, 24 aa, Homo sapiens
CARHPRPGIAVAGSLAGPDAFDIW

SEQ ID NO: 54908 - protein, 19 aa, Homo sapiens
CARDSSVITFGGVIFFDRW

SEQ ID NO: 54909 - protein, 17 aa, Homo sapiens
CARDIPSIAVAVERDYW

SEQ ID NO: 54910 - protein, 17 aa, Homo sapiens
CARVHDSIYYYYYMDVW

SEQ ID NO: 54911 - protein, 17 aa, Homo sapiens
CAKDLFSGSYSDAFDIW

SEQ ID NO: 54912 - protein, 19 aa, Homo sapiens
CAREVITMVQGVIIRADYW

SEQ ID NO: 54913 - protein, 18 aa, Homo sapiens
CARDLEGTTVTTGEFDYW

SEQ ID NO: 54914 - protein, 26 aa, Homo sapiens
CASSLGYCSSTSCDRGYYYYYGMDVW

SEQ ID NO: 54915 - protein, 23 aa, Homo sapiens
CAREVRDYDYIWGSYRYYGMDVW

SEQ ID NO: 54916 - protein, 19 aa, Homo sapiens
CARHWILGIAATLDAFDIW

SEQ ID NO: 54917 - protein, 20 aa, Homo sapiens
CARVSAPSLGLRLYWYFDLW

SEQ ID NO: 54918 - protein, 25 aa, Homo sapiens
CARGAGPMVQGVIHYYYYYYGMDVW

SEQ ID NO: 54919 - protein, 22 aa, Homo sapiens
CASSDCTGGVCYFGPPDQFDYW

SEQ ID NO: 54920 - protein, 17 aa, Homo sapiens
CATAPVVPAASNWFDPW

SEQ ID NO: 54921 - protein, 19 aa, Homo sapiens
CAAGFTIFGVVNPWYMDVW

SEQ ID NO: 54922 - protein, 13 aa, Homo sapiens
CARDQQRDAFDVW

SEQ ID NO: 54923 - protein, 24 aa, Homo sapiens
CARDELRYFDWLFPNYYYYGMDVW

SEQ ID NO: 54924 - protein, 16 aa, Homo sapiens
CATLEGDYDPRYFDYW

SEQ ID NO: 54925 - protein, 20 aa, Homo sapiens
CARDSHYYYDRDYYYGMDVW

SEQ ID NO: 54926 - protein, 19 aa, Homo sapiens
CARVVWLQEGYYYYYMDVW

SEQ ID NO: 54927 - protein, 16 aa, Homo sapiens
CARVRGWSIRYYFDYW

SEQ ID NO: 54928 - protein, 18 aa, Homo sapiens
CARRGVDFLYYYYYMDVW

SEQ ID NO: 54929 - protein, 17 aa, Homo sapiens
CARGHQGGYSLMWSDYW

SEQ ID NO: 54930 - protein, 19 aa, Homo sapiens
CARDRGRPDDYGDYVSDYW

SEQ ID NO: 54931 - protein, 20 aa, Homo sapiens
CAREIRLGIAVAGTVLFDYW

SEQ ID NO: 54932 - protein, 18 aa, Homo sapiens
CARLGHSSSLPLNWFDPW

SEQ ID NO: 54933 - protein, 24 aa, Homo sapiens
CARVVTYYYDSSGYSTIHNWFDPW

SEQ ID NO: 54934 - protein, 15 aa, Homo sapiens
CAKYGPYTGFEFDHW

SEQ ID NO: 54935 - protein, 20 aa, Homo sapiens
CARVGSRETEYYYYYYMDVW

SEQ ID NO: 54936 - protein, 17 aa, Homo sapiens
CARVTMTAETRYYFDYW

SEQ ID NO: 54937 - protein, 15 aa, Homo sapiens
CARRGFIFGDGMDVW

SEQ ID NO: 54938 - protein, 16 aa, Homo sapiens
CATVPPYLTGAVFDYW

SEQ ID NO: 54939 - protein, 16 aa, Homo sapiens
CARGSDDSGWNPVDYW

SEQ ID NO: 54940 - protein, 21 aa, Homo sapiens
CARDREGDDILTGYHNWFDPW

SEQ ID NO: 54941 - protein, 17 aa, Homo sapiens
CARLTHDFWSGYGFDYW

SEQ ID NO: 54942 - protein, 17 aa, Homo sapiens
CAKASEPYDYGDYVDYW

SEQ ID NO: 54943 - protein, 16 aa, Homo sapiens
CAREGSSETSSSPDYW

SEQ ID NO: 54944 - protein, 20 aa, Homo sapiens
CAREADNDFWSGLDYYFDYW

SEQ ID NO: 54945 - protein, 18 aa, Homo sapiens
CAKHPLYGGNPASYFDYW

SEQ ID NO: 54946 - protein, 18 aa, Homo sapiens
CARTTVVTLTRSVYFDYW

SEQ ID NO: 54947 - protein, 13 aa, Homo sapiens
CARRGIAVGFDPW

SEQ ID NO: 54948 - protein, 15 aa, Homo sapiens
CAREVIAAEGGVDYW

SEQ ID NO: 54949 - protein, 24 aa, Homo sapiens
CARYSGYDPLVSGVVSPMSAFDIW

SEQ ID NO: 54950 - protein, 19 aa, Homo sapiens
CARHETATPLLRGGHFDYW

SEQ ID NO: 54951 - protein, 19 aa, Homo sapiens
CAKGDGPYEYSSSSEFDPW

SEQ ID NO: 54952 - protein, 21 aa, Homo sapiens
CARAMYYYDSSGYNHDAFDIW

SEQ ID NO: 54953 - protein, 20 aa, Homo sapiens
CARQEAEGFRELGYNWFDPW

SEQ ID NO: 54954 - protein, 22 aa, Homo sapiens
CAKDAFIATLWTYDYYYYMDVW

SEQ ID NO: 54955 - protein, 20 aa, Homo sapiens
CARDHMSSEGLRTYYYMDVW

SEQ ID NO: 54956 - protein, 11 aa, Homo sapiens
CQQYDNLLCSF

SEQ ID NO: 54957 - protein, 20 aa, Homo sapiens
CARVPVPKYYYDSSALYDYW

SEQ ID NO: 54958 - protein, 17 aa, Homo sapiens
CARHVGWESAVEVFDYW

SEQ ID NO: 54959 - protein, 17 aa, Homo sapiens
CARDPRAGKTNDAFDMW

SEQ ID NO: 54960 - protein, 21 aa, Homo sapiens
CARIWYSSGWLGRQMGAFDIW

SEQ ID NO: 54961 - protein, 21 aa, Homo sapiens
CAREIRQAYFDWLFNNWFDPW

SEQ ID NO: 54962 - protein, 22 aa, Homo sapiens
CARELTPTASSSWGETDAFDIW

SEQ ID NO: 54963 - protein, 26 aa, Homo sapiens
CARDSPYYDFWSGYLGAPSSDWFDPW

SEQ ID NO: 54964 - protein, 16 aa, Homo sapiens
CARGNSDNYYGYFGPW

SEQ ID NO: 54965 - protein, 21 aa, Homo sapiens
CASLPVSITIFGVVSRYFQHW

SEQ ID NO: 54966 - protein, 19 aa, Homo sapiens
CTTDHGDSYGFAYYYMDVW

SEQ ID NO: 54967 - protein, 21 aa, Homo sapiens
CAREGGITIFGVVTDEYFQHW

SEQ ID NO: 54968 - protein, 19 aa, Homo sapiens
CARDRDYFGSGSYFFLDYW

SEQ ID NO: 54969 - protein, 20 aa, Homo sapiens
CARGLFTSIRVSTPTWFDPW

SEQ ID NO: 54970 - protein, 22 aa, Homo sapiens
CARARDYYDSREESNYWYFDLW

SEQ ID NO: 54971 - protein, 26 aa, Homo sapiens
CARVSPDYYDSSGYRQDYYYYGMDVW

SEQ ID NO: 54972 - protein, 19 aa, Homo sapiens
CAKDRTLTWGSGGYYFDNW

SEQ ID NO: 54973 - protein, 16 aa, Homo sapiens
CATGPGSGPQNWFDPW

SEQ ID NO: 54974 - protein, 25 aa, Homo sapiens
CARDLFSGYSGYDPTSYYYYGMDVW

SEQ ID NO: 54975 - protein, 19 aa, Homo sapiens
CARAVPLRSTRRYNWFDPW

SEQ ID NO: 54976 - protein, 19 aa, Homo sapiens
CARVRYGLGFLEGHWFDPW

SEQ ID NO: 54977 - protein, 18 aa, Homo sapiens
CARASPGELWLAYYFDSW

SEQ ID NO: 54978 - protein, 14 aa, Homo sapiens
CARALEHYAPNDYW

SEQ ID NO: 54979 - protein, 14 aa, Homo sapiens
CAKEVAYFDGFDLW

SEQ ID NO: 54980 - protein, 16 aa, Homo sapiens
CATGGVFGVVTWFDPW

SEQ ID NO: 54981 - protein, 15 aa, Homo sapiens
CARVTGWLRFIFDYW

SEQ ID NO: 54982 - protein, 24 aa, Homo sapiens
CARLDIVVVPAAPAYTYYYYMDVW

SEQ ID NO: 54983 - protein, 17 aa, Homo sapiens
CAKVESSSYRVDWFDPW

SEQ ID NO: 54984 - protein, 21 aa, Homo sapiens
CAHRLHGYYYDSSGYYYSDYW

SEQ ID NO: 54985 - protein, 21 aa, Homo sapiens
CAREASDYYDSSGYYLNFDYW

SEQ ID NO: 54986 - protein, 18 aa, Homo sapiens
CARGPYYDFWSENWFDPW

SEQ ID NO: 54987 - protein, 25 aa, Homo sapiens
CARALGGITMIVVVQAYYYYGMDVW

SEQ ID NO: 54988 - protein, 20 aa, Homo sapiens
CASINFESDYGDAHFWFDPW

SEQ ID NO: 54989 - protein, 13 aa, Homo sapiens
CAREPNLRYFDRW

SEQ ID NO: 54990 - protein, 16 aa, Homo sapiens
CASLEYSSSYGAIDYW

SEQ ID NO: 54991 - protein, 19 aa, Homo sapiens
CARHYYDSTSYYGGGFDYW

SEQ ID NO: 54992 - protein, 19 aa, Homo sapiens
CAARTYYYDSSDRYYFDYW

SEQ ID NO: 54993 - protein, 21 aa, Homo sapiens
CARLQGHCSGARCYRNYMDVW

SEQ ID NO: 54994 - protein, 14 aa, Homo sapiens
CARDPELTGAWDYW

SEQ ID NO: 54995 - protein, 19 aa, Homo sapiens
CASSRTPYYYDSSGLVDYW

SEQ ID NO: 54996 - protein, 21 aa, Homo sapiens
CARDPTVTTGDYYYYYGMDVW

SEQ ID NO: 54997 - protein, 17 aa, Homo sapiens
CTRKIYSAFEGGWFDPW

SEQ ID NO: 54998 - protein, 18 aa, Homo sapiens
CAREGTGYSSSCLWFDPW

SEQ ID NO: 54999 - protein, 18 aa, Homo sapiens
CARDRQRDYGPYDAFDIW

SEQ ID NO: 55000 - protein, 17 aa, Homo sapiens
CARRGGYSYGWDSLDIW

SEQ ID NO: 55001 - protein, 16 aa, Homo sapiens
CARYCKGTGDVCLDYW

SEQ ID NO: 55002 - protein, 14 aa, Homo sapiens
CANIYSSSENSDYW

SEQ ID NO: 55003 - protein, 15 aa, Homo sapiens
CARDLTTVARGFDYW

SEQ ID NO: 55004 - protein, 18 aa, Homo sapiens
CARGVDYYDNRANWFDPW

SEQ ID NO: 55005 - protein, 23 aa, Homo sapiens
CARDGGGDIVLGSPYYYYGMDVW

SEQ ID NO: 55006 - protein, 15 aa, Homo sapiens
CARNLPGATTAFDIW

SEQ ID NO: 55007 - protein, 14 aa, Homo sapiens
CARGKQLVFAFDIW

SEQ ID NO: 55008 - protein, 19 aa, Homo sapiens
CAREGLGELSESTTEFDYW

SEQ ID NO: 55009 - protein, 17 aa, Homo sapiens
CARCDSSSWYCGALDYW

SEQ ID NO: 55010 - protein, 19 aa, Homo sapiens
CARGPWSDTGYYYYGMAVW

SEQ ID NO: 55011 - protein, 21 aa, Homo sapiens
CARGGGSYSKYYYYYYYMDVW

SEQ ID NO: 55012 - protein, 20 aa, Homo sapiens
CARVFAYYDFYYILSWFDPW

SEQ ID NO: 55013 - protein, 16 aa, Homo sapiens
CQQSYSTPAFTGPYTF

SEQ ID NO: 55014 - protein, 19 aa, Homo sapiens
CATTSPFGDYALYRWFDPW

SEQ ID NO: 55015 - protein, 19 aa, Homo sapiens
CASFSEIGGGGVGIDFDYW

SEQ ID NO: 55016 - protein, 23 aa, Homo sapiens
CAKAGSPLEWFAPAYYYYYMDVW

SEQ ID NO: 55017 - protein, 24 aa, Homo sapiens
CARASDCSSTSCLIEVHEAWFDPW

SEQ ID NO: 55018 - protein, 19 aa, Homo sapiens
CATEGAFKWELLGNWFDPW

SEQ ID NO: 55019 - protein, 20 aa, Homo sapiens
CAKVPYYDYVWGNAYYFDYW

SEQ ID NO: 55020 - protein, 16 aa, Homo sapiens
CVKAACGSDCWLSDYW

SEQ ID NO: 55021 - protein, 15 aa, Homo sapiens
CARASAGATVWFDPW

SEQ ID NO: 55022 - protein, 16 aa, Homo sapiens
CARDPLERRWGYFDYW

SEQ ID NO: 55023 - protein, 16 aa, Homo sapiens
CAREGSGWERHIFDYW

SEQ ID NO: 55024 - protein, 18 aa, Homo sapiens
CARGRELVVYADDAFDIW

SEQ ID NO: 55025 - protein, 16 aa, Homo sapiens
CASAGYNWNDGAFDYW

SEQ ID NO: 55026 - protein, 19 aa, Homo sapiens
CARCFGGGGSCYHNWFDPW

SEQ ID NO: 55027 - protein, 20 aa, Homo sapiens
CARPLPANYYDSSGVAFDIW

SEQ ID NO: 55028 - protein, 17 aa, Homo sapiens
CARERGAIAARYAFDIW

SEQ ID NO: 55029 - protein, 24 aa, Homo sapiens
CARDYDILTGYYVDSYYYYGMDVW

SEQ ID NO: 55030 - protein, 21 aa, Homo sapiens
CASGGWGYGSGSYNGYYFDYW

SEQ ID NO: 55031 - protein, 20 aa, Homo sapiens
CARDVKRYFDWLLHGHFDYW

SEQ ID NO: 55032 - protein, 16 aa, Homo sapiens
CARIRLGRYTDAFDIW

SEQ ID NO: 55033 - protein, 18 aa, Homo sapiens
CARHLFRGGTPLDAFDIW

SEQ ID NO: 55034 - protein, 18 aa, Homo sapiens
CAREGLREARPGNWFDPW

SEQ ID NO: 55035 - protein, 19 aa, Homo sapiens
CAHSRFLWFRELFGYFDYW

SEQ ID NO: 55036 - protein, 20 aa, Homo sapiens
CAKLSGLSPGDYDSSAFDYW

SEQ ID NO: 55037 - protein, 21 aa, Homo sapiens
CARELGEITMIGYYYYYMDVW

SEQ ID NO: 55038 - protein, 16 aa, Homo sapiens
CARDKWFRQISYMDVW

SEQ ID NO: 55039 - protein, 18 aa, Homo sapiens
CATYPGYTSGYYYGMDVW

SEQ ID NO: 55040 - protein, 18 aa, Homo sapiens
CARDDYDYIWGSYTFDYW

SEQ ID NO: 55041 - protein, 14 aa, Homo sapiens
CARKHGDHEYFQHW

SEQ ID NO: 55042 - protein, 17 aa, Homo sapiens
CARIQRAWLVYDAFDIW

SEQ ID NO: 55043 - protein, 17 aa, Homo sapiens
CAADAHDSRGNREFDYW

SEQ ID NO: 55044 - protein, 17 aa, Homo sapiens
CAREPLHYYDNSGFDSW

SEQ ID NO: 55045 - protein, 21 aa, Homo sapiens
CAREGIVATIMGDYYYGMDVW

SEQ ID NO: 55046 - protein, 21 aa, Homo sapiens
CAHRQLSHYIWGSYRGDFDYW

SEQ ID NO: 55047 - protein, 16 aa, Homo sapiens
CARAATVTGYNWFDPW

SEQ ID NO: 55048 - protein, 26 aa, Homo sapiens
CARLIYDFWSGYYTIRAEYYYYMDVW

SEQ ID NO: 55049 - protein, 25 aa, Homo sapiens
CARDSDIVVVPAAKLDYYYYYMDVW

SEQ ID NO: 55050 - protein, 17 aa, Homo sapiens
CTREPVAIAAAGDFDYW

SEQ ID NO: 55051 - protein, 22 aa, Homo sapiens
CARDPGGTYYDFWSGLTAFDIW

SEQ ID NO: 55052 - protein, 18 aa, Homo sapiens
CAKLPTPRGYDWNAFDIW

SEQ ID NO: 55053 - protein, 22 aa, Homo sapiens
CARETILRYFDWLLSPGYFDYW

SEQ ID NO: 55054 - protein, 20 aa, Homo sapiens
CARRVRSDAVIDRNNWFDPW

SEQ ID NO: 55055 - protein, 18 aa, Homo sapiens
CAHTDNFIFGGVIVFDYW

SEQ ID NO: 55056 - protein, 20 aa, Homo sapiens
CARDRTYIWVQGVIGAFDVW

SEQ ID NO: 55057 - protein, 19 aa, Homo sapiens
CARGGHRGGYYYYYYMDVW

SEQ ID NO: 55058 - protein, 20 aa, Homo sapiens
CARVRLYYDFWSGYRYFDYW

SEQ ID NO: 55059 - protein, 29 aa, Homo sapiens
CAKDLSYYDFWSGYLSPQYYYYYYGMDVW

SEQ ID NO: 55060 - protein, 22 aa, Homo sapiens
CANSPDYGDFDDLYYYYYMDVW

SEQ ID NO: 55061 - protein, 13 aa, Homo sapiens
CAKLFDYAYFDYW

SEQ ID NO: 55062 - protein, 19 aa, Homo sapiens
CAGGLLWFRELSGYYFDYW

SEQ ID NO: 55063 - protein, 18 aa, Homo sapiens
CARDVSSVTTGVQWFDPW

SEQ ID NO: 55064 - protein, 22 aa, Homo sapiens
CARDQYYYDSSGYPRTGAFDIW

SEQ ID NO: 55065 - protein, 21 aa, Homo sapiens
CARDPHVGSSSGWSPLYFDYW

SEQ ID NO: 55066 - protein, 14 aa, Homo sapiens
CARDRAIKFFFDYW

SEQ ID NO: 55067 - protein, 24 aa, Homo sapiens
CARDQGERLRYFDWSKYYYYMDVW

SEQ ID NO: 55068 - protein, 26 aa, Homo sapiens
CARDQLTYYDFWSGHYGAPYYYMDVW

SEQ ID NO: 55069 - protein, 16 aa, Homo sapiens
CAREDIVATGAGFDYW

SEQ ID NO: 55070 - protein, 20 aa, Homo sapiens
CARTVLGVQGVIITRAFDYW

SEQ ID NO: 55071 - protein, 26 aa, Homo sapiens
CAKDWQYYDSSGYYAGGWGVDSFDYW

SEQ ID NO: 55072 - protein, 14 aa, Homo sapiens
CAKVWQWLAYFDYW

SEQ ID NO: 55073 - protein, 17 aa, Homo sapiens
CAHRRSSFSGPFWFDPW

SEQ ID NO: 55074 - protein, 26 aa, Homo sapiens
CARVSRDMDIAAAGPPYYYYYYMDVW

SEQ ID NO: 55075 - protein, 18 aa, Homo sapiens
CAKDVFLYYGPGSYFDYW

SEQ ID NO: 55076 - protein, 19 aa, Homo sapiens
CARVPGYCSGGSCPNVDYW

SEQ ID NO: 55077 - protein, 17 aa, Homo sapiens
CARDSDTERWLQPFDYW

SEQ ID NO: 55078 - protein, 17 aa, Homo sapiens
CARAYSSSWQACTVDYW

SEQ ID NO: 55079 - protein, 18 aa, Homo sapiens
CARDPGVLIAAADYFDYW

SEQ ID NO: 55080 - protein, 12 aa, Homo sapiens
CMQSIQLPRCSF

SEQ ID NO: 55081 - protein, 24 aa, Homo sapiens
CARSLGVLGSGYYTGIDYYYMDVW

SEQ ID NO: 55082 - protein, 16 aa, Homo sapiens
CAKGSDSSAYYYFDYW

SEQ ID NO: 55083 - protein, 23 aa, Homo sapiens
CAREVPDYDFWSGYTHPPYFDYW

SEQ ID NO: 55084 - protein, 16 aa, Homo sapiens
CATNTGYYYYYGMDVW

SEQ ID NO: 55085 - protein, 24 aa, Homo sapiens
CARDRADFWSGYYPSYYYYYMDVW

SEQ ID NO: 55086 - protein, 19 aa, Homo sapiens
CARTRYDFLFNYYYGMDVW

SEQ ID NO: 55087 - protein, 30 aa, Homo sapiens
CARNLPMGYYDFWSGYYKEGRSDYYYMDVW

SEQ ID NO: 55088 - protein, 14 aa, Homo sapiens
CARRLSLYTAFDIW

SEQ ID NO: 55089 - protein, 21 aa, Homo sapiens
CVLAADYDILTGYYLDAFDIW

SEQ ID NO: 55090 - protein, 21 aa, Homo sapiens
CAKDITIMIYGDYDVQSFDYW

SEQ ID NO: 55091 - protein, 19 aa, Homo sapiens
CARDALRTYSSNWHWDDYW

SEQ ID NO: 55092 - protein, 16 aa, Homo sapiens
CAREAEYISSCLGDYW

SEQ ID NO: 55093 - protein, 14 aa, Homo sapiens
CARDSGLTRNFDYW

SEQ ID NO: 55094 - protein, 19 aa, Homo sapiens
CATWLKKRGYYYYYGMDVW

SEQ ID NO: 55095 - protein, 21 aa, Homo sapiens
CASEPAATLDSHYYYYGMDVW

SEQ ID NO: 55096 - protein, 25 aa, Homo sapiens
CAKDSEYCSGGSCYSVYYYYGMDVW

SEQ ID NO: 55097 - protein, 15 aa, Homo sapiens
CAKGPTLTTLPIDYW

SEQ ID NO: 55098 - protein, 22 aa, Homo sapiens
CARSLRYSSGWYMTRPHYFDYW

SEQ ID NO: 55099 - protein, 22 aa, Homo sapiens
CARHSPHYYDSSGYYSGAFDIW

SEQ ID NO: 55100 - protein, 22 aa, Homo sapiens
CARAASPLSSGYSYYYYGMDVW

SEQ ID NO: 55101 - protein, 15 aa, Homo sapiens
CARDLRVAVEEDDYW

SEQ ID NO: 55102 - protein, 17 aa, Homo sapiens
CARSTKLVVIAYYFDYW

SEQ ID NO: 55103 - protein, 21 aa, Homo sapiens
CARSNSGYDSRYYYYYGMDVW

SEQ ID NO: 55104 - protein, 14 aa, Homo sapiens
CASGRYFDWLLDYW

SEQ ID NO: 55105 - protein, 14 aa, Homo sapiens
CAHRESYGDYVDYW

SEQ ID NO: 55106 - protein, 18 aa, Homo sapiens
CAGGGNPSGWYAGGFDPW

SEQ ID NO: 55107 - protein, 19 aa, Homo sapiens
CARIRLGTLLGGWYYFDYW

SEQ ID NO: 55108 - protein, 16 aa, Homo sapiens
CAKDRDSSSSWVFDPW

SEQ ID NO: 55109 - protein, 16 aa, Homo sapiens
CTTDYPTDGDYRLDYW

SEQ ID NO: 55110 - protein, 17 aa, Homo sapiens
CARSGDGHDYGDYFDYW

SEQ ID NO: 55111 - protein, 24 aa, Homo sapiens
CAAPYYDFWSGYYTNYYYYGMDVW

SEQ ID NO: 55112 - protein, 24 aa, Homo sapiens
CATTNLDSGYDLERNYYYYYMDVW

SEQ ID NO: 55113 - protein, 18 aa, Homo sapiens
CARGGENGDYFMSWFDPW

SEQ ID NO: 55114 - protein, 17 aa, Homo sapiens
CATQGPYDSSGYYSDYW

SEQ ID NO: 55115 - protein, 20 aa, Homo sapiens
CAKADDDYIWGSPQARFDPW

SEQ ID NO: 55116 - protein, 24 aa, Homo sapiens
CTKSEIVVVPTGKFRNSYYYMDVW

SEQ ID NO: 55117 - protein, 19 aa, Homo sapiens
CARTPIAVAASWVFYFDYW

SEQ ID NO: 55118 - protein, 17 aa, Homo sapiens
CATSFAIYRELSLLDYW

SEQ ID NO: 55119 - protein, 16 aa, Homo sapiens
CAHIQIAVAGTNPDYW

SEQ ID NO: 55120 - protein, 13 aa, Homo sapiens [sequence omitted]

SEQ ID NO: 55121 - protein, 19 aa, Homo sapiens
CARIQWELLGFYYYGMDVW

SEQ ID NO: 55122 - protein, 15 aa, Homo sapiens
CATLGVGELEAFDIW

SEQ ID NO: 55123 - protein, 13 aa, Homo sapiens
CARVSWEGYGDYW

SEQ ID NO: 55124 - protein, 21 aa, Homo sapiens
CARGRSPSYSSGWSGGWFDPW

SEQ ID NO: 55125 - protein, 15 aa, Homo sapiens
CAREGITVTDAFDIW

SEQ ID NO: 55126 - protein, 20 aa, Homo sapiens
CARDRITYYDFWSVGWFDPW

SEQ ID NO: 55127 - protein, 27 aa, Homo sapiens
CARDRGSEYYDFWSGSFPNYYYGMDVW

SEQ ID NO: 55128 - protein, 18 aa, Homo sapiens
CARDRGSAIVVGNWFDPW

SEQ ID NO: 55129 - protein, 20 aa, Homo sapiens
CAKLPDYIWGSYPSDAFDIW

SEQ ID NO: 55130 - protein, 22 aa, Homo sapiens
CARGPEYYDFWSGYYGYYMDVW

SEQ ID NO: 55131 - protein, 15 aa, Homo sapiens
CAHRVSTLYASFDFW

SEQ ID NO: 55132 - protein, 22 aa, Homo sapiens
CARDRGTMPRFEYLYYYYMDVW

SEQ ID NO: 55133 - protein, 26 aa, Homo sapiens
CARDFWTGVDDYGDYTHYYYYGMDVW

SEQ ID NO: 55134 - protein, 16 aa, Homo sapiens
CARDHGDVVVVSPDYW

SEQ ID NO: 55135 - protein, 16 aa, Homo sapiens
CAKPWGGYYTAPFDYW

SEQ ID NO: 55136 - protein, 20 aa, Homo sapiens
CARDLTGTVGFDYYYGMDVW

SEQ ID NO: 55137 - protein, 17 aa, Homo sapiens
CARDIYYGSGSPLGDYW

SEQ ID NO: 55138 - protein, 14 aa, Homo sapiens
CARVSAGNWHIDYW

SEQ ID NO: 55139 - protein, 19 aa, Homo sapiens
CAHVPVLGGYRWGEAFDIW

SEQ ID NO: 55140 - protein, 16 aa, Homo sapiens
CARDIPLGQWLAQDYW

SEQ ID NO: 55141 - protein, 18 aa, Homo sapiens
CARDTESSGWPSYYFDYW

SEQ ID NO: 55142 - protein, 20 aa, Homo sapiens
CAHSPYEFWSGDYPYSFDYW

SEQ ID NO: 55143 - protein, 18 aa, Homo sapiens
CARKPSNPYGASYYFDYW

SEQ ID NO: 55144 - protein, 28 aa, Homo sapiens
CARDRQVGEDIWFRELFDVYYYYGMDVW

SEQ ID NO: 55145 - protein, 18 aa, Homo sapiens
CARGTSSVTIGDWYFDLW

SEQ ID NO: 55146 - protein, 19 aa, Homo sapiens
CARDPFSVVEPAANWFDPW

SEQ ID NO: 55147 - protein, 23 aa, Homo sapiens
CARDEHCSGGSCPYYYYYYMDVW

SEQ ID NO: 55148 - protein, 16 aa, Homo sapiens
CARDFGSGWLNWFDPW

SEQ ID NO: 55149 - protein, 20 aa, Homo sapiens
CATQFAIVVVPAAMNYFDYW

SEQ ID NO: 55150 - protein, 24 aa, Homo sapiens
CARDGPDGDTIFGVAPRSYYMDVW

SEQ ID NO: 55151 - protein, 20 aa, Homo sapiens
CARDRGEDSGYDLAFYLDYW

SEQ ID NO: 55152 - protein, 15 aa, Homo sapiens
CAKFGSSWWQTFDYW

SEQ ID NO: 55153 - protein, 17 aa, Homo sapiens
CTRDERYDSRYDAFDIW

SEQ ID NO: 55154 - protein, 21 aa, Homo sapiens
CARDGDNAVVEDATPFGFDMW

SEQ ID NO: 55155 - protein, 22 aa, Homo sapiens
CARAVRRGITIFGVVTYYFDDW

SEQ ID NO: 55156 - protein, 19 aa, Homo sapiens
CASNALWSGYYTGDAFDIW

SEQ ID NO: 55157 - protein, 15 aa, Homo sapiens
CAKDVAVEFLFFDNW

SEQ ID NO: 55158 - protein, 14 aa, Homo sapiens
CVRRGGYNFGYDYW

SEQ ID NO: 55159 - protein, 16 aa, Homo sapiens
CAKGGMYSSSWLGDYW

SEQ ID NO: 55160 - protein, 18 aa, Homo sapiens
CARDHPSSSSWTEPFDYW

SEQ ID NO: 55161 - protein, 18 aa, Homo sapiens
CAREDSSSSNYYYYMDVW

SEQ ID NO: 55162 - protein, 18 aa, Homo sapiens
CAREPHCTGGVCGAFDIW

SEQ ID NO: 55163 - protein, 17 aa, Homo sapiens
CARLSGVVVIAEFFDYW

SEQ ID NO: 55164 - protein, 26 aa, Homo sapiens
CARELEMRDDYIWGSFHYYYYYMDVW

SEQ ID NO: 55165 - protein, 18 aa, Homo sapiens
CATGLKWELNYYYYMDVW

SEQ ID NO: 55166 - protein, 19 aa, Homo sapiens
CARSHSRPLQGETGWFDPW

SEQ ID NO: 55167 - protein, 14 aa, Homo sapiens
CQSADNGGAYPVVF

SEQ ID NO: 55168 - protein, 14 aa, Homo sapiens
CASQITMIDPLDYW

SEQ ID NO: 55169 - protein, 19 aa, Homo sapiens
CARVPGPGTVTTRGAFDIW

SEQ ID NO: 55170 - protein, 18 aa, Homo sapiens
CARGRWVATRREYYLDYW

SEQ ID NO: 55171 - protein, 18 aa, Homo sapiens
CARVRARWRGSSDAFDIW

SEQ ID NO: 55172 - protein, 23 aa, Homo sapiens
CARDSGVLRYFDWSPGPDAFDIW

SEQ ID NO: 55173 - protein, 16 aa, Homo sapiens
CARIESSWDGGWFDPW

SEQ ID NO: 55174 - protein, 18 aa, Homo sapiens
CAREQLGKWGATYYFDYW

SEQ ID NO: 55175 - protein, 21 aa, Homo sapiens
CARDRVEYSGYDGYYYYMDVW

SEQ ID NO: 55176 - protein, 18 aa, Homo sapiens
CARSDYGDDQGHDAFAIW

SEQ ID NO: 55177 - protein, 21 aa, Homo sapiens
CAREDVSAKPSGWYVPLFDYW

SEQ ID NO: 55178 - protein, 23 aa, Homo sapiens
CARHEKAKITIFGVVTQNWFDPW

SEQ ID NO: 55179 - protein, 19 aa, Homo sapiens
CAKDPGGQQLVQDWYFDLW

SEQ ID NO: 55180 - protein, 16 aa, Homo sapiens
CATARSPYSSSPLDYW

SEQ ID NO: 55181 - protein, 19 aa, Homo sapiens
CARVSGDRPYYYYYYMDVW

SEQ ID NO: 55182 - protein, 27 aa, Homo sapiens
CAREAPPGSHYSDRSGYYYQLDAFDIW

SEQ ID NO: 55183 - protein, 14 aa, Homo sapiens
CTSRYYYGSGLDYW

SEQ ID NO: 55184 - protein, 24 aa, Homo sapiens
CARDTKVYSDILTDWPPKYFFDYW

SEQ ID NO: 55185 - protein, 20 aa, Homo sapiens
CARDFTMVQGAYYYYGMDVW

SEQ ID NO: 55186 - protein, 14 aa, Homo sapiens
CARVATDTTAFGYW

SEQ ID NO: 55187 - protein, 22 aa, Homo sapiens
CGTDQVPWAAIRGSGLEYFQHW

SEQ ID NO: 55188 - protein, 26 aa, Homo sapiens
CARDSLTYYDFWSGYWEDYYYGMDVW

SEQ ID NO: 55189 - protein, 17 aa, Homo sapiens
CASGRTPYYDILTSDYW

SEQ ID NO: 55190 - protein, 18 aa, Homo sapiens
CARDQTVSDYGDSVFDYW

SEQ ID NO: 55191 - protein, 14 aa, Homo sapiens
CAKDLAWGLGLDYW

SEQ ID NO: 55192 - protein, 21 aa, Homo sapiens
CARVRYYCSSTSCYPSYFDYW

SEQ ID NO: 55193 - protein, 18 aa, Homo sapiens
CARESYGGGGDFWYFDLW

SEQ ID NO: 55194 - protein, 18 aa, Homo sapiens
CARTVGGWLQLVWWFDPW

SEQ ID NO: 55195 - protein, 16 aa, Homo sapiens
CAIALEMATIVPPDYW

SEQ ID NO: 55196 - protein, 16 aa, Homo sapiens
CARHERWDLLGGIDYW

SEQ ID NO: 55197 - protein, 21 aa, Homo sapiens
CARSRSLLRYFDWSYDAFDIW

SEQ ID NO: 55198 - protein, 25 aa, Homo sapiens
CAKDPHYVWGSYRPGSYYYYGMDVW

SEQ ID NO: 55199 - protein, 24 aa, Homo sapiens
CAKDVLSIAAAGKDYYYYYGMDVW

SEQ ID NO: 55200 - protein, 19 aa, Homo sapiens
CARESPGYVYGSVYYFDHW

SEQ ID NO: 55201 - protein, 23 aa, Homo sapiens
CARGGGYYYDGSGSQIENYFDAW

SEQ ID NO: 55202 - protein, 16 aa, Homo sapiens
CASGYCSGGSCYFTEW

SEQ ID NO: 55203 - protein, 16 aa, Homo sapiens
CARHGRQWLVPFFDYW

SEQ ID NO: 55204 - protein, 16 aa, Homo sapiens
CAHRLVGWTTANFDYW

SEQ ID NO: 55205 - protein, 15 aa, Homo sapiens
CALQNYDTTGAFDYW

SEQ ID NO: 55206 - protein, 23 aa, Homo sapiens
CARGGRGYYGSGSAHYYYGMDVW

SEQ ID NO: 55207 - protein, 25 aa, Homo sapiens
CARRRTDSYYDSSGYYLAENWFDPW

SEQ ID NO: 55208 - protein, 19 aa, Homo sapiens
CARIRGIVGATPFDAFDIW

SEQ ID NO: 55209 - protein, 22 aa, Homo sapiens
CARLPPLIVGRSRRVGDAFDIW

SEQ ID NO: 55210 - protein, 14 aa, Homo sapiens
CAVYSGFLGYFDLW

SEQ ID NO: 55211 - protein, 21 aa, Homo sapiens
CARIKMVRGVIISLTYYFDYW

SEQ ID NO: 55212 - protein, 13 aa, Homo sapiens
CQSSGYSHVGDYW

SEQ ID NO: 55213 - protein, 21 aa, Homo sapiens
CARDSMPVLLWLQPGWYFDLW

SEQ ID NO: 55214 - protein, 12 aa, Homo sapiens
CGKALFGEGDYW

SEQ ID NO: 55215 - protein, 21 aa, Homo sapiens
CARMIGDYPNYYYYYYGMDVW

SEQ ID NO: 55216 - protein, 16 aa, Homo sapiens
CAGGYSGYGHINFDYW

SEQ ID NO: 55217 - protein, 15 aa, Homo sapiens
CARRGYGGFTHFDSW

SEQ ID NO: 55218 - protein, 22 aa, Homo sapiens
CAKHPHRGVAMIVVVITGVDYW

SEQ ID NO: 55219 - protein, 18 aa, Homo sapiens
CAHREGDSSWWGGYFDYW

SEQ ID NO: 55220 - protein, 20 aa, Homo sapiens
CAKDLITIFFAGTGSPVDYW

SEQ ID NO: 55221 - protein, 20 aa, Homo sapiens
CARLPIDSMDTAMVHPLDYW

SEQ ID NO: 55222 - protein, 15 aa, Homo sapiens
CAKGTSWSLKYFRDW

SEQ ID NO: 55223 - protein, 16 aa, Homo sapiens
CARDLSYSGYDEFDYW

SEQ ID NO: 55224 - protein, 23 aa, Homo sapiens
CARAQYYYDSSGYYQFETNFDYW

SEQ ID NO: 55225 - protein, 17 aa, Homo sapiens
CARTVPLNYYYYGMDVW

SEQ ID NO: 55226 - protein, 23 aa, Homo sapiens
CAKPPWPYYDSSGYSQGDAFDIW

SEQ ID NO: 55227 - protein, 16 aa, Homo sapiens
CAKDLYSSGWGGFDYW

SEQ ID NO: 55228 - protein, 20 aa, Homo sapiens
CAKDRRGEGTSVTTYYFDYW

SEQ ID NO: 55229 - protein, 14 aa, Homo sapiens
CAQSYYGGRPFDIW

SEQ ID NO: 55230 - protein, 21 aa, Homo sapiens
CAKDWEDGSGSYYLGGWFDPW

SEQ ID NO: 55231 - protein, 14 aa, Homo sapiens
CARHGKQWSYFDPW

SEQ ID NO: 55232 - protein, 12 aa, Homo sapiens
CSSYAGSNIRIF

SEQ ID NO: 55233 - protein, 25 aa, Homo sapiens
CARVIQYYDILTGYYSPAMGPVDYW

SEQ ID NO: 55234 - protein, 23 aa, Homo sapiens
CARHSIAGYCSGGSCLRTWFDYW

SEQ ID NO: 55235 - protein, 12 aa, Homo sapiens
CAIITMNTKDYW

SEQ ID NO: 55236 - protein, 20 aa, Homo sapiens
CARDQSSYSNWNDGGPFDYW

SEQ ID NO: 55237 - protein, 29 aa, Homo sapiens
CARVHYSLVPAANFDRSDRNYYYYGMDVW

SEQ ID NO: 55238 - protein, 16 aa, Homo sapiens
CARCNTAMGVWYFDLW

SEQ ID NO: 55239 - protein, 12 aa, Homo sapiens
CQHYDSYSPLTF

SEQ ID NO: 55240 - protein, 14 aa, Homo sapiens
CARQGRGYNPLDYW

SEQ ID NO: 55241 - protein, 19 aa, Homo sapiens
CARSRGGIWESSGWSFDVW

SEQ ID NO: 55242 - protein, 13 aa, Homo sapiens
CQAWDSSTETEIF

SEQ ID NO: 55243 - protein, 20 aa, Homo sapiens
CARVSPYYCSGGSCYAFDIW

SEQ ID NO: 55244 - protein, 22 aa, Homo sapiens
CARDIPLGYSGYDPGNDAFDIW

SEQ ID NO: 55245 - protein, 14 aa, Homo sapiens
CAKSSPVWGSYDYW

SEQ ID NO: 55246 - protein, 17 aa, Homo sapiens
CAKDRGQQWLVDLLDYW

SEQ ID NO: 55247 - protein, 27 aa, Homo sapiens
CARVGPLTVTTGRPSMYSYYYYGMDVW

SEQ ID NO: 55248 - protein, 18 aa, Homo sapiens
CARLISQSSAYDSYFDTW

SEQ ID NO: 55249 - protein, 24 aa, Homo sapiens
CARDLPRGEWELLSGYYYYGMDVW

SEQ ID NO: 55250 - protein, 23 aa, Homo sapiens
CARDPTYYYDSSGYYYDRNVDYW

SEQ ID NO: 55251 - protein, 16 aa, Homo sapiens
CATVPQVGAVYIFDFW

SEQ ID NO: 55252 - protein, 24 aa, Homo sapiens
CARSVRYYDILTGYYISSPPLDYW

SEQ ID NO: 55253 - protein, 20 aa, Homo sapiens
CARVPKRWLQLRYEYYFDYW

SEQ ID NO: 55254 - protein, 21 aa, Homo sapiens
CARAYRVTSYYDSSAYYFDYW

SEQ ID NO: 55255 - protein, 16 aa, Homo sapiens
CAKDRYQLQLRYIDYW

SEQ ID NO: 55256 - protein, 24 aa, Homo sapiens
CASFFGSGSYYFGPDYYYYGMDVW

SEQ ID NO: 55257 - protein, 21 aa, Homo sapiens
CARGRSDSSSWYTSGFFFDYW

SEQ ID NO: 55258 - protein, 19 aa, Homo sapiens
CARDIPAWNDLPNDAFDIW

SEQ ID NO: 55259 - protein, 18 aa, Homo sapiens
CARGGPRRSGGLQDFDYW

SEQ ID NO: 55260 - protein, 16 aa, Homo sapiens
CATSYSIVGATPPDYW

SEQ ID NO: 55261 - protein, 24 aa, Homo sapiens
CARWADYYDSSGYWQDYYYGMDVW

SEQ ID NO: 55262 - protein, 22 aa, Homo sapiens
CAREVSGRNVDWSREGSYFDSW

SEQ ID NO: 55263 - protein, 26 aa, Homo sapiens
CAKDQDIVAVPAAMPAPYYYYGMDVW

SEQ ID NO: 55264 - protein, 11 aa, Homo sapiens
CQQYDGYPPAF

SEQ ID NO: 55265 - protein, 18 aa, Homo sapiens
CARGPYYGSGSYYNTDYW

SEQ ID NO: 55266 - protein, 16 aa, Homo sapiens
CARDRLKYGDYSLDYW

SEQ ID NO: 55267 - protein, 24 aa, Homo sapiens
CARDISSYNFIVGATTALFWFDPW

SEQ ID NO: 55268 - protein, 16 aa, Homo sapiens
CAREGDPLVIDAFDIW

SEQ ID NO: 55269 - protein, 18 aa, Homo sapiens
CVRQVRGGSWYDPHFDFW

SEQ ID NO: 55270 - protein, 14 aa, Homo sapiens
CASAGYSGALFDYW

SEQ ID NO: 55271 - protein, 23 aa, Homo sapiens
CAAELIVYDILTGYYSHYGMDVW

SEQ ID NO: 55272 - protein, 20 aa, Homo sapiens
CARGEFGYTYGRFFWYPDLW

SEQ ID NO: 55273 - protein, 17 aa, Homo sapiens
CARTPATPVLYWFFDSW

SEQ ID NO: 55274 - protein, 19 aa, Homo sapiens
CAKAIGDYSFIYYYGMDVW

SEQ ID NO: 55275 - protein, 14 aa, Homo sapiens
CRYTEVRGGAFDYW

SEQ ID NO: 55276 - protein, 16 aa, Homo sapiens
CARILGFGGDVWFDPW

SEQ ID NO: 55277 - protein, 21 aa, Homo sapiens
CATDWNSYYYGSGSYYNGDYW

SEQ ID NO: 55278 - protein, 21 aa, Homo sapiens
CARDRYYYDSSGYPEGPFGYW

SEQ ID NO: 55279 - protein, 14 aa, Homo sapiens
CAREALGATWIDYW

SEQ ID NO: 55280 - protein, 23 aa, Homo sapiens
CASDYGGFGESLVRYYYYGMDVW

SEQ ID NO: 55281 - protein, 19 aa, Homo sapiens
CARDPPTIVVVVAAPLDYW

SEQ ID NO: 55282 - protein, 16 aa, Homo sapiens
CAHRRPWYRGADFDYW

SEQ ID NO: 55283 - protein, 21 aa, Homo sapiens
CAREYQLAEELYYYYYGMDVW

SEQ ID NO: 55284 - protein, 19 aa, Homo sapiens
CARDRGQIIVVVPNWFDPW

SEQ ID NO: 55285 - protein, 24 aa, Homo sapiens
CARDRVVVVPAADGGYYYYGMDVW

SEQ ID NO: 55286 - protein, 17 aa, Homo sapiens
CARGVWFGESYWYFDLW

SEQ ID NO: 55287 - protein, 14 aa, Homo sapiens
CAHKSVAAAVFDYW

SEQ ID NO: 55288 - protein, 17 aa, Homo sapiens
CATLEVDDGANFYFDYW

SEQ ID NO: 55289 - protein, 24 aa, Homo sapiens
CAKDSGPYSSGWYWGLIEYYFDYW

SEQ ID NO: 55290 - protein, 20 aa, Homo sapiens
CAKTPPQRAKWWSDWYFDLW

SEQ ID NO: 55291 - protein, 18 aa, Homo sapiens
CARTLYDRTANNPTFDHW

SEQ ID NO: 55292 - protein, 18 aa, Homo sapiens
CHTTVVTPIDYYYGMDVW

SEQ ID NO: 55293 - protein, 17 aa, Homo sapiens
CARPPFYDSSSWYFDYW

SEQ ID NO: 55294 - protein, 16 aa, Homo sapiens
CARPAHLLIHYAFDIW

SEQ ID NO: 55295 - protein, 19 aa, Homo sapiens
CARVPPLYGDYGLNWFDPW

SEQ ID NO: 55296 - protein, 23 aa, Homo sapiens
CARLGPYYCSSTSCYAGRLIDYW

SEQ ID NO: 55297 - protein, 18 aa, Homo sapiens
CARNVPLERVEEVLFDYW

SEQ ID NO: 55298 - protein, 20 aa, Homo sapiens
CARDLCDGRGCSLFYYLDCW

SEQ ID NO: 55299 - protein, 18 aa, Homo sapiens
CARDSWGDNSGYYYFDYW

SEQ ID NO: 55300 - protein, 16 aa, Homo sapiens
CARMPYYSGYQNNDYW

SEQ ID NO: 55301 - protein, 20 aa, Homo sapiens
CAKDDFVRAAAGTPYYFDYW

SEQ ID NO: 55302 - protein, 15 aa, Homo sapiens
CASCGSDCFFAFDSW

SEQ ID NO: 55303 - protein, 28 aa, Homo sapiens
CARDGDIVVVVAAHHLAHDYYYYGMDVW

SEQ ID NO: 55304 - protein, 16 aa, Homo sapiens
CARNPRDYNSGWADYW

SEQ ID NO: 55305 - protein, 21 aa, Homo sapiens
CATDASMVRGVKYYYYGMDVW

SEQ ID NO: 55306 - protein, 17 aa, Homo sapiens
CAKAKQWLETGNYFDYW

SEQ ID NO: 55307 - protein, 24 aa, Homo sapiens
CARGQDRTNYDILTGYQTNWFDPW

SEQ ID NO: 55308 - protein, 24 aa, Homo sapiens
CARVAGASGGYDSLSLYYYAMDVW

SEQ ID NO: 55309 - protein, 21 aa, Homo sapiens
CARFRKAYGSGSYHSPDFDYW

SEQ ID NO: 55310 - protein, 18 aa, Homo sapiens
CARHESQWYSGSYQVDYW

SEQ ID NO: 55311 - protein, 18 aa, Homo sapiens
CARVPGFVVVPADHFDYW

SEQ ID NO: 55312 - protein, 17 aa, Homo sapiens
CARGIVLWIPHDAFDIW

SEQ ID NO: 55313 - protein, 18 aa, Homo sapiens
CAKTPTGSSTSPHRYDYW

SEQ ID NO: 55314 - protein, 23 aa, Homo sapiens
CATGGGDILTGSRDYYYYGMDVW

SEQ ID NO: 55315 - protein, 17 aa, Homo sapiens
CARDRFIPRGYLLGDYW

SEQ ID NO: 55316 - protein, 22 aa, Homo sapiens
CAREGGGVLRYFDWLNGALDYW

SEQ ID NO: 55317 - protein, 17 aa, Homo sapiens
CAHREPPPYGVDYFDYW

SEQ ID NO: 55318 - protein, 22 aa, Homo sapiens
CARAGYYDSSGYYFQPLHFDYW

SEQ ID NO: 55319 - protein, 16 aa, Homo sapiens
CARIRYAVRGVPFDYW

SEQ ID NO: 55320 - protein, 21 aa, Homo sapiens
CARGPYSSGTYLGRDYWFDPW

SEQ ID NO: 55321 - protein, 24 aa, Homo sapiens
CARDRSIVATIMGDYYYYYGMDVW

SEQ ID NO: 55322 - protein, 22 aa, Homo sapiens
CARDSLVGATMRSYYYYGMDVW

SEQ ID NO: 55323 - protein, 15 aa, Homo sapiens
CARECPRSSNCADYW

SEQ ID NO: 55324 - protein, 15 aa, Homo sapiens
CAGRAAAGELGDDYW

SEQ ID NO: 55325 - protein, 23 aa, Homo sapiens
CARGIVVVVAARPHYYYYGMDVW

SEQ ID NO: 55326 - protein, 19 aa, Homo sapiens
CARVGTSSSTWYGGYFDFW

SEQ ID NO: 55327 - protein, 23 aa, Homo sapiens
CAKGVQEDIFYDGRGYGHFFDYW

SEQ ID NO: 55328 - protein, 16 aa, Homo sapiens
CAREIPNVPYSMGDYW

SEQ ID NO: 55329 - protein, 18 aa, Homo sapiens
CARDRGIRYFEPDAFDIW

SEQ ID NO: 55330 - protein, 20 aa, Homo sapiens
CAKGISGYGYASYPEGFDVW

SEQ ID NO: 55331 - protein, 18 aa, Homo sapiens
CARTQCLTSCYFDAFDIW

SEQ ID NO: 55332 - protein, 22 aa, Homo sapiens
CARDVVKQWRSGYYYYYGMDVW

SEQ ID NO: 55333 - protein, 17 aa, Homo sapiens
CAKKPGSGWSYNWFDPW

SEQ ID NO: 55334 - protein, 24 aa, Homo sapiens
CAHYSAGDYIVVVPAAMYNWFDPW

SEQ ID NO: 55335 - protein, 28 aa, Homo sapiens
CAKGSVPPYCSGGSCYYSLYYYYGMDVW

SEQ ID NO: 55336 - protein, 17 aa, Homo sapiens
CAKELQLVRSHGPFDVW

SEQ ID NO: 55337 - protein, 16 aa, Homo sapiens
CAREPTSGVLRGFDSW

SEQ ID NO: 55338 - protein, 23 aa, Homo sapiens
CARVNPGSSGWSHYYYYYGMDVW

SEQ ID NO: 55339 - protein, 16 aa, Homo sapiens
CAREVKWFGEGAFDIW

SEQ ID NO: 55340 - protein, 26 aa, Homo sapiens
CAREGIETSSWYALGAGYYYYGMDVW

SEQ ID NO: 55341 - protein, 24 aa, Homo sapiens
CAKDLGYCSGVRCSDYYYYGMDVW

SEQ ID NO: 55342 - protein, 15 aa, Homo sapiens
CGLWFGEYEPYFDYW

SEQ ID NO: 55343 - protein, 20 aa, Homo sapiens
CARGGVEYCSSTSCYYFDYW

SEQ ID NO: 55344 - protein, 15 aa, Homo sapiens
CGAGYTSSWSDFDYW

SEQ ID NO: 55345 - protein, 13 aa, Homo sapiens
CDSRDSSGKWEVF

SEQ ID NO: 55346 - protein, 19 aa, Homo sapiens
CAKPDRGPWGVVAAGFDYW

SEQ ID NO: 55347 - protein, 20 aa, Homo sapiens
CARHSIAVAGGSEGAWLDYW

SEQ ID NO: 55348 - protein, 21 aa, Homo sapiens
CVKLRGHYHDILTGYGIFDYW

SEQ ID NO: 55349 - protein, 20 aa, Homo sapiens
CAREVLHNPDSRGADYFDYW

SEQ ID NO: 55350 - protein, 17 aa, Homo sapiens
CAREGRGAADNNWFDPW

SEQ ID NO: 55351 - protein, 17 aa, Homo sapiens
CAKDPLIVVVNGVWDYW

SEQ ID NO: 55352 - protein, 14 aa, Homo sapiens
CATLSALLYYFDYW

SEQ ID NO: 55353 - protein, 21 aa, Homo sapiens
CARLEREGIAAAGYYYGMDVW

SEQ ID NO: 55354 - protein, 22 aa, Homo sapiens
CARGPHPYTYGDYGFAFAFDIW

SEQ ID NO: 55355 - protein, 16 aa, Homo sapiens
CARESNWGSSPPLDYW

SEQ ID NO: 55356 - protein, 19 aa, Homo sapiens
CAKHQPLVKIGWVRDLDYW

SEQ ID NO: 55357 - protein, 13 aa, Homo sapiens
CARAERYELVDYW

SEQ ID NO: 55358 - protein, 14 aa, Homo sapiens
CARIRAATTAIDYW

SEQ ID NO: 55359 - protein, 14 aa, Homo sapiens
CARDGDLRRAPDYW

SEQ ID NO: 55360 - protein, 17 aa, Homo sapiens
CASIGFCSGGTCYNDFW

SEQ ID NO: 55361 - protein, 16 aa, Homo sapiens
CAKGLTGTRLDCFDPW

SEQ ID NO: 55362 - protein, 17 aa, Homo sapiens
CARQRGIASETSYLDYW

SEQ ID NO: 55363 - protein, 14 aa, Homo sapiens
CARMSAGAGSFDFW

SEQ ID NO: 55364 - protein, 18 aa, Homo sapiens
CAKTGVILAPPPYYFDSW

SEQ ID NO: 55365 - protein, 25 aa, Homo sapiens
CARVGTAADYDYVWGTPSYWYFDLW

SEQ ID NO: 55366 - protein, 31 aa, Homo sapiens
CALPILRAEDTAFYYCATGFTSGWSDAFDIW

SEQ ID NO: 55367 - protein, 19 aa, Homo sapiens
CARAAPLIVATRGGAFDIW

SEQ ID NO: 55368 - protein, 20 aa, Homo sapiens
CAKDLQWLNGYYYYYGMDVW

SEQ ID NO: 55369 - protein, 24 aa, Homo sapiens
CARDPTSIVGATAGYYYYYGMDVW

SEQ ID NO: 55370 - protein, 20 aa, Homo sapiens
CAREARSPTTVTPDSYFDYW

SEQ ID NO: 55371 - protein, 15 aa, Homo sapiens
CARTQHSSGYNHDYW

SEQ ID NO: 55372 - protein, 20 aa, Homo sapiens
CARGETAMVFPYYYYGLDVW

SEQ ID NO: 55373 - protein, 25 aa, Homo sapiens
CARGDCSGGSCYFPEDSYYYGMDVW

SEQ ID NO: 55374 - protein, 13 aa, Homo sapiens
CQHYGSSPGSHIF

SEQ ID NO: 55375 - protein, 13 aa, Homo sapiens
CQAADGSGTYAGF

SEQ ID NO: 55376 - protein, 26 aa, Homo sapiens
CAKGVGVGAWGELIGNALDWLYFDYW

SEQ ID NO: 55377 - protein, 24 aa, Homo sapiens
CAKDHLLGFGYYDSSGYSYYFDYW

SEQ ID NO: 55378 - protein, 17 aa, Homo sapiens
CARDLSIAVAASLRDYW

SEQ ID NO: 55379 - protein, 19 aa, Homo sapiens
CAREEWLINEPLYNWFDPW

SEQ ID NO: 55380 - protein, 20 aa, Homo sapiens
CARLYGDYGDLLTPDAFDIW

SEQ ID NO: 55381 - protein, 15 aa, Homo sapiens
CAKARRYFDWIFDSW

SEQ ID NO: 55382 - protein, 22 aa, Homo sapiens
CARSPGWTSSDLIVVADVFDYW

SEQ ID NO: 55383 - protein, 18 aa, Homo sapiens
CGHAPGIWFGELLTFDYW

SEQ ID NO: 55384 - protein, 20 aa, Homo sapiens
CARDRRYCSGGSCDSYFDYW

SEQ ID NO: 55385 - protein, 26 aa, Homo sapiens
CARTPTVGYCSGGNCYGFRVRSFDVW

SEQ ID NO: 55386 - protein, 21 aa, Homo sapiens
CHRPRRADDSVYYGDDAFDIW

SEQ ID NO: 55387 - protein, 22 aa, Homo sapiens
CARVGSSSWYLRGSASRYFDLW

SEQ ID NO: 55388 - protein, 23 aa, Homo sapiens
CATGGYDSSGYLGIYYYYGMDVW

SEQ ID NO: 55389 - protein, 17 aa, Homo sapiens
CANARAVVPAAMPFDYW

SEQ ID NO: 55390 - protein, 16 aa, Homo sapiens
CAKDTLPVAAHLFDYW

SEQ ID NO: 55391 - protein, 18 aa, Homo sapiens
CARVIGDILTGYYTFDYW

SEQ ID NO: 55392 - protein, 17 aa, Homo sapiens
CAKGDWYSSSWYPCDYW

SEQ ID NO: 55393 - protein, 21 aa, Homo sapiens
CARIPWENSGGYYYYYGMDVW

SEQ ID NO: 55394 - protein, 19 aa, Homo sapiens
CARRPRFESLGYSYAFDTW

SEQ ID NO: 55395 - protein, 16 aa, Homo sapiens
CARHRVGQTHYYFDYW

SEQ ID NO: 55396 - protein, 15 aa, Homo sapiens
CVRPSEMAGTAFDSW

SEQ ID NO: 55397 - protein, 12 aa, Homo sapiens
CQQYSSHSGVTF

SEQ ID NO: 55398 - protein, 21 aa, Homo sapiens
CARGGWVRGSSHYVLDAFDIW

SEQ ID NO: 55399 - protein, 10 aa, Homo sapiens
CSSSGFFDPW

SEQ ID NO: 55400 - protein, 23 aa, Homo sapiens
CARGDQRILVRGVIILAHYFDYW

SEQ ID NO: 55401 - protein, 18 aa, Homo sapiens
CARSGLVRGVIIDEFDYW

SEQ ID NO: 55402 - protein, 24 aa, Homo sapiens
CARDVLVVGSPLRDYYYYYGMDVW

SEQ ID NO: 55403 - protein, 23 aa, Homo sapiens
CARQAGQKGFSGSYWVSGFFDYW

SEQ ID NO: 55404 - protein, 19 aa, Homo sapiens
CARLDDEPSGSYYNGLDYW

SEQ ID NO: 55405 - protein, 19 aa, Homo sapiens
CARDLGSSGWADPDAPDYW

SEQ ID NO: 55406 - protein, 28 aa, Homo sapiens
CARVSIVVVPAAIAANKYYYYYYGMDVW

SEQ ID NO: 55407 - protein, 21 aa, Homo sapiens
CAKIDSVAPQWAQNDDAFDIW

SEQ ID NO: 55408 - protein, 20 aa, Homo sapiens
CAKHGNGSATYFKRGGFDYW

SEQ ID NO: 55409 - protein, 23 aa, Homo sapiens
CAHSLRYFDWLTGATNPSTFDYW

SEQ ID NO: 55410 - protein, 19 aa, Homo sapiens
CARASLSKQWLVRYYFDYW

SEQ ID NO: 55411 - protein, 17 aa, Homo sapiens
CARVRDTAMVKSAFDIW

SEQ ID NO: 55412 - protein, 14 aa, Homo sapiens
CAKPHLTITSFDPW

SEQ ID NO: 55413 - protein, 14 aa, Homo sapiens
CARRSHTSLGFDIW

SEQ ID NO: 55414 - protein, 15 aa, Homo sapiens
CARVRLWFGELEDYW

SEQ ID NO: 55415 - protein, 22 aa, Homo sapiens
CARTNPYNYDSSGYSSDVFDIW

SEQ ID NO: 55416 - protein, 19 aa, Homo sapiens
CARDYSSGWGTYYFAMDVW

SEQ ID NO: 55417 - protein, 13 aa, Homo sapiens
CATGVDTSIFDYW

SEQ ID NO: 55418 - protein, 27 aa, Homo sapiens
CARDYYYYDSSGYYYRTAYYYYGMDVW

SEQ ID NO: 55419 - protein, 21 aa, Homo sapiens
CARGLGVMVRGVIKNPYFDYW

SEQ ID NO: 55420 - protein, 18 aa, Homo sapiens
CTRRVGFVGQNGYYFDYW

SEQ ID NO: 55421 - protein, 18 aa, Homo sapiens
CASSDSSPWDYYYGMDVW

SEQ ID NO: 55422 - protein, 22 aa, Homo sapiens
CARHRRGFALMGEYGGGYFDSW

SEQ ID NO: 55423 - protein, 21 aa, Homo sapiens
CAKDKSLEGYFDWLIPYFDYW

SEQ ID NO: 55424 - protein, 19 aa, Homo sapiens
CARQKVFTDLTPLNWFDPW

SEQ ID NO: 55425 - protein, 16 aa, Homo sapiens
CVKDPSGERGFYFDFW

SEQ ID NO: 55426 - protein, 19 aa, Homo sapiens
CARGGVYYDILTGSGFDPW

SEQ ID NO: 55427 - protein, 15 aa, Homo sapiens
CAMTSGGGATNPDYW

SEQ ID NO: 55428 - protein, 23 aa, Homo sapiens
CARDQSDGYNSGSNYYYYGMDVW

SEQ ID NO: 55429 - protein, 21 aa, Homo sapiens
CATEYPYGSGSYYNGDGMDVW

SEQ ID NO: 55430 - protein, 22 aa, Homo sapiens
CARGRKRGYCSSTSCYWGFDPW

SEQ ID NO: 55431 - protein, 21 aa, Homo sapiens
CARGTLGDRCTSTSCFHFDFW

SEQ ID NO: 55432 - protein, 20 aa, Homo sapiens
CARDSEYSYGFHYYYGMDVW

SEQ ID NO: 55433 - protein, 20 aa, Homo sapiens
CARDLAHYDILTGYGYFDYW

SEQ ID NO: 55434 - protein, 21 aa, Homo sapiens
CAREYYYDSSGLLTGVYWGYW

SEQ ID NO: 55435 - protein, 21 aa, Homo sapiens
CVRVGGGYSSEGYYYHGMDVW

SEQ ID NO: 55436 - protein, 19 aa, Homo sapiens
CASRITMIVSGRRRDFDYW

SEQ ID NO: 55437 - protein, 23 aa, Homo sapiens
CARIRAPAWIAALKNRAGGFDIW

SEQ ID NO: 55438 - protein, 18 aa, Homo sapiens
CAKDKDWGFSTSRYFDLW

SEQ ID NO: 55439 - protein, 14 aa, Homo sapiens
CAKLSAKEYSSDYW

SEQ ID NO: 55440 - protein, 13 aa, Homo sapiens
CATDRSTSYFDLW

SEQ ID NO: 55441 - protein, 18 aa, Homo sapiens
CARVNDDDYPPLFHFDLW

SEQ ID NO: 55442 - protein, 28 aa, Homo sapiens
CARVGYGSGSYFPRDSLSNYYYYGMDVW

SEQ ID NO: 55443 - protein, 26 aa, Homo sapiens
CARDRPLYCSSTSCPEFYYYYGMDVW

SEQ ID NO: 55444 - protein, 21 aa, Homo sapiens
CASFTPTYYDYVWGSYRLDYW

SEQ ID NO: 55445 - protein, 21 aa, Homo sapiens
CARKRKAPDFGWLLSGYFDLW

SEQ ID NO: 55446 - protein, 23 aa, Homo sapiens
CARGGRGSSSGSFSYYYYGMDVW

SEQ ID NO: 55447 - protein, 18 aa, Homo sapiens
CARDFVDYGDIGYYFDYW

SEQ ID NO: 55448 - protein, 20 aa, Homo sapiens
CARDIGEWELPSAYWYFDLW

SEQ ID NO: 55449 - protein, 24 aa, Homo sapiens
CARGVDASGNYYNYNPLIKWFDPW

SEQ ID NO: 55450 - protein, 16 aa, Homo sapiens
CFRLTHSGGYDGGDYW

SEQ ID NO: 55451 - protein, 10 aa, Homo sapiens
CARETMHDYW

SEQ ID NO: 55452 - protein, 18 aa, Homo sapiens
CARHLWIQLGREWAFDYW

SEQ ID NO: 55453 - protein, 16 aa, Homo sapiens
CARTYLSGNVNWFGPW

SEQ ID NO: 55454 - protein, 18 aa, Homo sapiens
CAHGGHDDIGYHNWFDPW

SEQ ID NO: 55455 - protein, 20 aa, Homo sapiens
CARELITMVRGVTHWYFDLW

SEQ ID NO: 55456 - protein, 22 aa, Homo sapiens
CATDSIAAAGIGDYYYYGMDVW

SEQ ID NO: 55457 - protein, 18 aa, Homo sapiens
CAKDSTYPLWFGSWFDPW

SEQ ID NO: 55458 - protein, 15 aa, Homo sapiens
CVMTLSTSSLSFDYW

SEQ ID NO: 55459 - protein, 15 aa, Homo sapiens
CARDTLEAVAGIDYW

SEQ ID NO: 55460 - protein, 21 aa, Homo sapiens
CARGQKDSSSLFASKVEFDYW

SEQ ID NO: 55461 - protein, 17 aa, Homo sapiens
CAKDRGSSWSGDGMDVW

SEQ ID NO: 55462 - protein, 21 aa, Homo sapiens
CAREWNYDILTGYFLAYFDLW

SEQ ID NO: 55463 - protein, 15 aa, Homo sapiens
CARGSSNSLYPFDYW

SEQ ID NO: 55464 - protein, 16 aa, Homo sapiens
CARGGNSLFYWYFDLW

SEQ ID NO: 55465 - protein, 15 aa, Homo sapiens
CARALSGWYDPCDYW

SEQ ID NO: 55466 - protein, 14 aa, Homo sapiens
CARDGFDWTYFDYW

SEQ ID NO: 55467 - protein, 17 aa, Homo sapiens
CASDYDILTGYHLFDYW

SEQ ID NO: 55468 - protein, 23 aa, Homo sapiens
CAREPEGDYYDSSGYYYGAFDIW

SEQ ID NO: 55469 - protein, 14 aa, Homo sapiens
CATVGGDLQSFAYW

SEQ ID NO: 55470 - protein, 16 aa, Homo sapiens
CARALPHSSLWAFDIW

SEQ ID NO: 55471 - protein, 21 aa, Homo sapiens
CAKEGLSWGYSSGWYDPSDYW

SEQ ID NO: 55472 - protein, 19 aa, Homo sapiens
CARGCTSTSCYRSGWFDPW

SEQ ID NO: 55473 - protein, 19 aa, Homo sapiens
CVRGNLRWQQMRGPDFDYW

SEQ ID NO: 55474 - protein, 14 aa, Homo sapiens
CTRREEQWLAHDYW

SEQ ID NO: 55475 - protein, 17 aa, Homo sapiens
CARDYSPEYSFGYNAYW

SEQ ID NO: 55476 - protein, 19 aa, Homo sapiens
CAKVPLGRYSGYDYYFDYW

SEQ ID NO: 55477 - protein, 24 aa, Homo sapiens
CARGEGSIRRLLTPPIYYYGMDVW

SEQ ID NO: 55478 - protein, 13 aa, Homo sapiens
CHVWDRSSDHGVF

SEQ ID NO: 55479 - protein, 21 aa, Homo sapiens
CARGGMVLRWLQPGHWYFDLW

SEQ ID NO: 55480 - protein, 25 aa, Homo sapiens
CARAYPDYGDYASESPYYYYGMDVW

SEQ ID NO: 55481 - protein, 15 aa, Homo sapiens
CSRARSGSYSDGDYW

SEQ ID NO: 55482 - protein, 20 aa, Homo sapiens
CARQNEYYYDGSGTDSFDIW

SEQ ID NO: 55483 - protein, 19 aa, Homo sapiens
CAYKEDYGLGSYWIYFNFW

SEQ ID NO: 55484 - protein, 15 aa, Homo sapiens
CAHSSGLVITHFDYW

SEQ ID NO: 55485 - protein, 20 aa, Homo sapiens
CAKGGSGLVVVPDHYYFDYW

SEQ ID NO: 55486 - protein, 28 aa, Homo sapiens
CARVQSYEYYDILTGYYNPFYYWYFDLW

SEQ ID NO: 55487 - protein, 17 aa, Homo sapiens
CAKVALNLVVTAEMDYW

SEQ ID NO: 55488 - protein, 14 aa, Homo sapiens
CVSWGYSYGLVDYW

SEQ ID NO: 55489 - protein, 24 aa, Homo sapiens
CATTYYYDSSGYYYGAIGYYFDYW

SEQ ID NO: 55490 - protein, 17 aa, Homo sapiens
CARFWRPVVVPVAIDYW

SEQ ID NO: 55491 - protein, 18 aa, Homo sapiens
CAKDKRGSGSYYSVFDSW

SEQ ID NO: 55492 - protein, 16 aa, Homo sapiens
CTRGEQWLAARWFGPW

SEQ ID NO: 55493 - protein, 31 aa, Homo sapiens
CARVKGIRNRDYYDILTGYYGDYYYYGMDVW

SEQ ID NO: 55494 - protein, 15 aa, Homo sapiens
CARAWKYSGWLNDYW

SEQ ID NO: 55495 - protein, 21 aa, Homo sapiens
CARDWGYCSSTSCHTELFDYW

SEQ ID NO: 55496 - protein, 23 aa, Homo sapiens
CAREPIFTYYYGSGSSYNWFDPW

SEQ ID NO: 55497 - protein, 17 aa, Homo sapiens
CVKVAPGEHALRYFDVW

SEQ ID NO: 55498 - protein, 14 aa, Homo sapiens
CASLILTGYYFESW

SEQ ID NO: 55499 - protein, 36 aa, Homo sapiens
CALPISAVYYCARGSLYYDILTGYLPRTLDWYFDLW

SEQ ID NO: 55500 - protein, 16 aa, Homo sapiens
CAHIEGGGWLVYFDYW

SEQ ID NO: 55501 - protein, 20 aa, Homo sapiens
CATDTVTTYPHYYYYGMDVW

SEQ ID NO: 55502 - protein, 24 aa, Homo sapiens
CARDSYGYCSSTSCHDYYYGMDVW

SEQ ID NO: 55503 - protein, 17 aa, Homo sapiens
CAKSLGFATVTTEFDYW

SEQ ID NO: 55504 - protein, 17 aa, Homo sapiens
CARDPIVASLQDFFDFW

SEQ ID NO: 55505 - protein, 20 aa, Homo sapiens
CARGVVTAVPRESHNWFDPW

SEQ ID NO: 55506 - protein, 24 aa, Homo sapiens
CARNTWLLWFGEQNPKPYNWFDPW

SEQ ID NO: 55507 - protein, 21 aa, Homo sapiens
CARVATPIAAAGNVGWYFDLW

SEQ ID NO: 55508 - protein, 21 aa, Homo sapiens
CARGAITWIQLSHRINYFDYW

SEQ ID NO: 55509 - protein, 14 aa, Homo sapiens
CASLTQWELGFDIW

SEQ ID NO: 55510 - protein, 17 aa, Homo sapiens
CTTEFYDFFSGDAFDIW

SEQ ID NO: 55511 - protein, 32 aa, Homo sapiens
CALPISAVYFCARTRAGSGDIGYYYYFGMDVW

SEQ ID NO: 55512 - protein, 19 aa, Homo sapiens
CAKGGMQLWSRDIGWFDPW

SEQ ID NO: 55513 - protein, 19 aa, Homo sapiens
CARGAPYHSFDSRGYYVYW

SEQ ID NO: 55514 - protein, 16 aa, Homo sapiens
CASSLYSGSYAPFDYW

SEQ ID NO: 55515 - protein, 19 aa, Homo sapiens
CARDRGGVGATTFGPFDYW

SEQ ID NO: 55516 - protein, 20 aa, Homo sapiens
CARDSGQWLVPFRPDAFDIW

SEQ ID NO: 55517 - protein, 16 aa, Homo sapiens
CANRGSAVAGTGFDPW

SEQ ID NO: 55518 - protein, 18 aa, Homo sapiens
CTRRSEMATTIPLDFDYW

SEQ ID NO: 55519 - protein, 19 aa, Homo sapiens
CARGDKWPLDYYYYGMDVW

SEQ ID NO: 55520 - protein, 16 aa, Homo sapiens
CTTDFGYGSYGAFDYW

SEQ ID NO: 55521 - protein, 20 aa, Homo sapiens
CARDNPLNNNWYAGDWFDPW

SEQ ID NO: 55522 - protein, 20 aa, Homo sapiens
CATPLGGYSYALEPVAFDIW

SEQ ID NO: 55523 - protein, 18 aa, Homo sapiens
CARRMYGSGSYYITFDYW

SEQ ID NO: 55524 - protein, 25 aa, Homo sapiens
CAASLSIRGYSYGPPSYYYYGMDVW

SEQ ID NO: 55525 - protein, 18 aa, Homo sapiens
CATSSGGWLGVHDYFDNW

SEQ ID NO: 55526 - protein, 18 aa, Homo sapiens
CAKDDSGSYYIFDAFDIW

SEQ ID NO: 55527 - protein, 17 aa, Homo sapiens
CARETVEMATVPALDYW

SEQ ID NO: 55528 - protein, 22 aa, Homo sapiens
CAKYAGRGGWLRPIQNNCFDSW

SEQ ID NO: 55529 - protein, 22 aa, Homo sapiens
CARHVGVIVVVPAAKLREFDYW

SEQ ID NO: 55530 - protein, 26 aa, Homo sapiens
CARELRYFDWLLYSSGWYVGSPLDYW

SEQ ID NO: 55531 - protein, 18 aa, Homo sapiens
CARDLSAYGDYEWHFDVW

SEQ ID NO: 55532 - protein, 19 aa, Homo sapiens
CARHTGGSGSYYNGGFDYW

SEQ ID NO: 55533 - protein, 22 aa, Homo sapiens
CARDYGSGSYYNGAEPNHLDYW

SEQ ID NO: 55534 - protein, 17 aa, Homo sapiens
CAKNEGWEVSSYHFDYW

SEQ ID NO: 55535 - protein, 24 aa, Homo sapiens
CAKMGPRRGYEVLTGHWASHFDYW

SEQ ID NO: 55536 - protein, 20 aa, Homo sapiens
CARAGSNIAVVPAAMGVDYW

SEQ ID NO: 55537 - protein, 19 aa, Homo sapiens
CAKDGDQWQWLVPDFLDYW

SEQ ID NO: 55538 - protein, 20 aa, Homo sapiens
CAKGNYLWFGELPVYYFDYW

SEQ ID NO: 55539 - protein, 16 aa, Homo sapiens
CASLPRGSSWLLPDYW

SEQ ID NO: 55540 - protein, 21 aa, Homo sapiens
CATVRFETYYYDSSGYAFDIW

SEQ ID NO: 55541 - protein, 17 aa, Homo sapiens
CARGGYYYGSAYSLDYW

SEQ ID NO: 55542 - protein, 21 aa, Homo sapiens
CARGKREWLSRSYYYYGMDVW

SEQ ID NO: 55543 - protein, 21 aa, Homo sapiens
CARLGNGDYQYYYYYYGMDVW

SEQ ID NO: 55544 - protein, 18 aa, Homo sapiens
CAKDRQIVTMMDWYFDLW

SEQ ID NO: 55545 - protein, 15 aa, Homo sapiens
CVKDFTAWGELFDFW

SEQ ID NO: 55546 - protein, 25 aa, Homo sapiens
CARAQRPMVRGVIPPDYYYYGMDVW

SEQ ID NO: 55547 - protein, 21 aa, Homo sapiens
CARARPHMSSSWYGRNWFDPW

SEQ ID NO: 55548 - protein, 11 aa, Homo sapiens
CQQRDNWVLSF

SEQ ID NO: 55549 - protein, 14 aa, Homo sapiens
CATFSSTGEYFEDW

SEQ ID NO: 55550 - protein, 17 aa, Homo sapiens
CATPHRSYGLLGYFDYW

SEQ ID NO: 55551 - protein, 17 aa, Homo sapiens
CARDSSNWNDDGGLDYW

SEQ ID NO: 55552 - protein, 14 aa, Homo sapiens
CAREGRLVRTLDYW

SEQ ID NO: 55553 - protein, 21 aa, Homo sapiens
CARDVSEIWFGDPELYYFDYW

SEQ ID NO: 55554 - protein, 25 aa, Homo sapiens
CARTEYSIGWYYSHWSRKTGYYDFW

SEQ ID NO: 55555 - protein, 23 aa, Homo sapiens
CAREVYSSGWHPWNTGGGPFDYW

SEQ ID NO: 55556 - protein, 15 aa, Homo sapiens
CAKASEWSEYYFDYW

SEQ ID NO: 55557 - protein, 14 aa, Homo sapiens
CQSYDASLGGSGIF

SEQ ID NO: 55558 - protein, 19 aa, Homo sapiens
CAQGTSTTYSNTWSATDYW

SEQ ID NO: 55559 - protein, 18 aa, Homo sapiens
CAKEMGAYCNGDCYPDYW

SEQ ID NO: 55560 - protein, 29 aa, Homo sapiens
CASPPEQPGGYSGYDRSPVMDYYYGMDVW

SEQ ID NO: 55561 - protein, 23 aa, Homo sapiens
CARDLTSVDTAISYYYYYGMDVW

SEQ ID NO: 55562 - protein, 22 aa, Homo sapiens
CARVGEGYCSGGSCYSGIFDYW

SEQ ID NO: 55563 - protein, 16 aa, Homo sapiens
CYSTDSSGNQKRGVVF

SEQ ID NO: 55564 - protein, 25 aa, Homo sapiens
CATVLLWFGELGVSYSYYYYGMDVW

SEQ ID NO: 55565 - protein, 19 aa, Homo sapiens
CAKDREWYGSGSYSPPDYW

SEQ ID NO: 55566 - protein, 18 aa, Homo sapiens
CARRTGDFDYYNYGMDVW

SEQ ID NO: 55567 - protein, 23 aa, Homo sapiens
CAKDVWFRAAAGTEYYYYGMDVW

SEQ ID NO: 55568 - protein, 18 aa, Homo sapiens
CARNRGYDIGLPITFDIW

SEQ ID NO: 55569 - protein, 24 aa, Homo sapiens
CARAHSRPGVWFGELLLEGYFDYW

SEQ ID NO: 55570 - protein, 25 aa, Homo sapiens
CARDRGNDGGYVWGSYRYWGPCDYW

SEQ ID NO: 55571 - protein, 20 aa, Homo sapiens
CAREWAHSMIVVVITSFDYW

SEQ ID NO: 55572 - protein, 22 aa, Homo sapiens
CARPAWGYYGSGSYYYYGMDVW

SEQ ID NO: 55573 - protein, 14 aa, Homo sapiens
CAHSLSWYSAFDIW

SEQ ID NO: 55574 - protein, 22 aa, Homo sapiens
CARERTSRSFDWTLYYYGMDVW

SEQ ID NO: 55575 - protein, 21 aa, Homo sapiens
CARDGQGLLPGYKYYYGLDVW

SEQ ID NO: 55576 - protein, 17 aa, Homo sapiens
CARDRGVYPPKYYFDYW

SEQ ID NO: 55577 - protein, 24 aa, Homo sapiens
CARGTPRWSPEQWLVRSSNWFDPW

SEQ ID NO: 55578 - protein, 24 aa, Homo sapiens
CARDRFQNSYDILTGHIPYYFDYW

SEQ ID NO: 55579 - protein, 16 aa, Homo sapiens
CATGPTVTRANWFDPW

SEQ ID NO: 55580 - protein, 23 aa, Homo sapiens
CAKVRGWNPDVTRHRYYDGVDVW

SEQ ID NO: 55581 - protein, 19 aa, Homo sapiens
CARELLSYNWNDLYYFDYW

SEQ ID NO: 55582 - protein, 25 aa, Homo sapiens
CARGMEGDLTVVRGVVHYYYGMDVW

SEQ ID NO: 55583 - protein, 18 aa, Homo sapiens
CATASPITGTPVVWFDPW

SEQ ID NO: 55584 - protein, 21 aa, Homo sapiens
CARLQSGSGNYYYYYYGLDVW

SEQ ID NO: 55585 - protein, 21 aa, Homo sapiens
CARHNWDYSSGYYYYYGMDVW

SEQ ID NO: 55586 - protein, 14 aa, Homo sapiens
CGRHATVTTAFDYW

SEQ ID NO: 55587 - protein, 18 aa, Homo sapiens
CVRDGENYDMLTGYPDSW

SEQ ID NO: 55588 - protein, 15 aa, Homo sapiens
CAKYTRDWPTYSDYW

SEQ ID NO: 55589 - protein, 21 aa, Homo sapiens
CARGSVRYYYGSGSWYYFDYW

SEQ ID NO: 55590 - protein, 20 aa, Homo sapiens
CARGFTLNSDSGSYGPFDFW

SEQ ID NO: 55591 - protein, 16 aa, Homo sapiens
CAHRKIPMVTSYFDYW

SEQ ID NO: 55592 - protein, 22 aa, Homo sapiens
CARAWFPPGGNSAYYYYGMDVW

SEQ ID NO: 55593 - protein, 15 aa, Homo sapiens
CASASSWYIPHFDYW

SEQ ID NO: 55594 - protein, 16 aa, Homo sapiens
CARGPYLRGYSGHDYW

SEQ ID NO: 55595 - protein, 17 aa, Homo sapiens
CAIPAAGNYYYYGMDVW

SEQ ID NO: 55596 - protein, 22 aa, Homo sapiens
CARGGGTWIQLWERYPNWFDPW

SEQ ID NO: 55597 - protein, 20 aa, Homo sapiens
CARGRYSSSWYGEWNAFDIW

SEQ ID NO: 55598 - protein, 23 aa, Homo sapiens
CAKANHGVLHQVVLAAPYYFDYW

SEQ ID NO: 55599 - protein, 15 aa, Homo sapiens
CAHTPADYGDYVDYW

SEQ ID NO: 55600 - protein, 19 aa, Homo sapiens
CAREGNMDNWNDRWYFDLW

SEQ ID NO: 55601 - protein, 23 aa, Homo sapiens
CARVQDPLNWGSLRYYYYGMDVW

SEQ ID NO: 55602 - protein, 11 aa, Homo sapiens
CQSSYSSNQVF

SEQ ID NO: 55603 - protein, 23 aa, Homo sapiens
CARVTVSYNWNAQYWVYNWFDPW

SEQ ID NO: 55604 - protein, 18 aa, Homo sapiens
CARDFSTGSQTAYYFDYW

SEQ ID NO: 55605 - protein, 19 aa, Homo sapiens
CARVGCSGGSCYPGAFDYW

SEQ ID NO: 55606 - protein, 16 aa, Homo sapiens
CAKGYLGEEDYYFDYW

SEQ ID NO: 55607 - protein, 20 aa, Homo sapiens
CARDLMVGSSWYDSNWFDPW

SEQ ID NO: 55608 - protein, 13 aa, Homo sapiens
CARDHSGGAFGYW

SEQ ID NO: 55609 - protein, 17 aa, Homo sapiens
CAREAKDWLVPWFFDYW

SEQ ID NO: 55610 - protein, 17 aa, Homo sapiens
CARQTFGEFRYWYFDLW

SEQ ID NO: 55611 - protein, 18 aa, Homo sapiens
CARIGQVGSYYYYGMDVW

SEQ ID NO: 55612 - protein, 20 aa, Homo sapiens
CATGGSDIVATISGTPFDYW

SEQ ID NO: 55613 - protein, 22 aa, Homo sapiens
CTRVGSSGWYLYYYYYYGMDVW

SEQ ID NO: 55614 - protein, 17 aa, Homo sapiens
CARHGYYYGSGRDFDYW

SEQ ID NO: 55615 - protein, 22 aa, Homo sapiens
CARDPGSVATILSYYYYGMDVW

SEQ ID NO: 55616 - protein, 15 aa, Homo sapiens
CARGSYDSSDPNDYW

SEQ ID NO: 55617 - protein, 23 aa, Homo sapiens
CARARLRGYSYGLLNYYYALDVW

SEQ ID NO: 55618 - protein, 20 aa, Homo sapiens
CASPKGDSSGYYSLDAFDIW

SEQ ID NO: 55619 - protein, 17 aa, Homo sapiens
CARERESGYDSTPFDYW

SEQ ID NO: 55620 - protein, 26 aa, Homo sapiens
CAKVIGYYGSGSYYKYYYYYYGMDVW

SEQ ID NO: 55621 - protein, 24 aa, Homo sapiens
CAKVLGRWNSGYDLLDYYYGMDVW

SEQ ID NO: 55622 - protein, 27 aa, Homo sapiens
CARVTSRYCSSTSCWYSASFYWYFDLW

SEQ ID NO: 55623 - protein, 17 aa, Homo sapiens
CARDNNQWGSGDGFDIW

SEQ ID NO: 55624 - protein, 19 aa, Homo sapiens
CASQISGGEWELPNWFDPW

SEQ ID NO: 55625 - protein, 18 aa, Homo sapiens
CARIAAAGDRLRVIIDYW

SEQ ID NO: 55626 - protein, 19 aa, Homo sapiens
CAREGHSGYRALEYYFDYW

SEQ ID NO: 55627 - protein, 22 aa, Homo sapiens
CAHRALFCSGVNCYSYDAFDIW

SEQ ID NO: 55628 - protein, 22 aa, Homo sapiens
CTSWVEMATIGASYYYYGMDVW

SEQ ID NO: 55629 - protein, 14 aa, Homo sapiens
CASGTPMVTSFDYW

SEQ ID NO: 55630 - protein, 16 aa, Homo sapiens
CARFDGSGRGDAFDIW

SEQ ID NO: 55631 - protein, 18 aa, Homo sapiens
CAKIYWMGYYDSSPFDYW

SEQ ID NO: 55632 - protein, 25 aa, Homo sapiens
CAKGGYSGYDGVFYYYYYYYGMDVW

SEQ ID NO: 55633 - protein, 15 aa, Homo sapiens
CARSYTGEAQYLQHW

SEQ ID NO: 55634 - protein, 22 aa, Homo sapiens
CARDGVEGYYGSGSYDNWFDPW

SEQ ID NO: 55635 - protein, 18 aa, Homo sapiens
CAKDLTRVAVADWYFDLW

SEQ ID NO: 55636 - protein, 11 aa, Homo sapiens
CQYYGGSPSPF

SEQ ID NO: 55637 - protein, 16 aa, Homo sapiens
CARDGNCGGASCYDYW

SEQ ID NO: 55638 - protein, 16 aa, Homo sapiens
CAKDFSSSWHNYFDPW

SEQ ID NO: 55639 - protein, 15 aa, Homo sapiens
CARGTLTTVTTFDFW

SEQ ID NO: 55640 - protein, 24 aa, Homo sapiens
CAKDGAYYYDSSGYYYWGWYFDLW

SEQ ID NO: 55641 - protein, 17 aa, Homo sapiens
CARVGHNSPYYYAMDVW

SEQ ID NO: 55642 - protein, 18 aa, Homo sapiens
CARIAYSGYSYGPLYDYW

SEQ ID NO: 55643 - protein, 19 aa, Homo sapiens
CAHHLYGGVSGWYNWFDPW

SEQ ID NO: 55644 - protein, 25 aa, Homo sapiens
CARCTTMVRGVITLTPRSYWYFDLW

SEQ ID NO: 55645 - protein, 16 aa, Homo sapiens
CAKDSGAYGGQDFDYW

SEQ ID NO: 55646 - protein, 16 aa, Homo sapiens
CAKVGSSSFRGSLDYW

SEQ ID NO: 55647 - protein, 23 aa, Homo sapiens
CARLLIAVVPGAVGGYYYGMDVW

SEQ ID NO: 55648 - protein, 16 aa, Homo sapiens
CVHRRLRWGTYLFDYW

SEQ ID NO: 55649 - protein, 15 aa, Homo sapiens
CARDDSWGGYNLDYW

SEQ ID NO: 55650 - protein, 19 aa, Homo sapiens
CAHSSYDILTGYQNWFDPW

SEQ ID NO: 55651 - protein, 23 aa, Homo sapiens
CARGSSPGIQLWIYYYYYGMDVW

SEQ ID NO: 55652 - protein, 18 aa, Homo sapiens
CAREFWQWLPPHYYFDYW

SEQ ID NO: 55653 - protein, 20 aa, Homo sapiens
CARAMTTVTWGYYYYAMDVW

SEQ ID NO: 55654 - protein, 23 aa, Homo sapiens
CARDRSPCGGDCYSYYYYGMDVW

SEQ ID NO: 55655 - protein, 21 aa, Homo sapiens
CARSMYYFISRNYYLLAFDLW

SEQ ID NO: 55656 - protein, 13 aa, Homo sapiens
CVRHFVGTGSDYW

SEQ ID NO: 55657 - protein, 23 aa, Homo sapiens
CAIYVPHYYESSGYYPGEYFQHW

SEQ ID NO: 55658 - protein, 28 aa, Homo sapiens
CARDTGHVTEYPLYGSVVSVTGGAFDIW

SEQ ID NO: 55659 - protein, 20 aa, Homo sapiens
CARGRYGYSSSLPHWYFDLW

SEQ ID NO: 55660 - protein, 21 aa, Homo sapiens
CAREGAATTVTTHLTNWFDPW

SEQ ID NO: 55661 - protein, 22 aa, Homo sapiens
CARDRGYGDYWVWSRNSPFDYW

SEQ ID NO: 55662 - protein, 20 aa, Homo sapiens
CARGGALSMIVVVITYLDYW

SEQ ID NO: 55663 - protein, 26 aa, Homo sapiens
CARTSAALGTLAPKSRFYYYYGMDVW

SEQ ID NO: 55664 - protein, 14 aa, Homo sapiens
CARGLWGGYGGDYW

SEQ ID NO: 55665 - protein, 29 aa, Homo sapiens
CVRLQKERGDCSGGSCPITYYYYYGMDVW

SEQ ID NO: 55666 - protein, 33 aa, Homo sapiens
CLRSEDTAVYYCARGGWYRGVIISYSLSAFDIW

SEQ ID NO: 55667 - protein, 23 aa, Homo sapiens
CAKTYGSGSYYTYYYYYYGMDVW

SEQ ID NO: 55668 - protein, 24 aa, Homo sapiens
CATFGPPSDLIIAFGGVVAPFDYW

SEQ ID NO: 55669 - protein, 21 aa, Homo sapiens
CATFGLGCSGVTCNRNWFDPW

SEQ ID NO: 55670 - protein, 21 aa, Homo sapiens
CARVKSRQWLVRDGLYYFDYW

SEQ ID NO: 55671 - protein, 22 aa, Homo sapiens
CAKLHEEGAYYHKSGSNYPDFW

SEQ ID NO: 55672 - protein, 20 aa, Homo sapiens
CAATTVTTSFAYYYYGMDVW

SEQ ID NO: 55673 - protein, 24 aa, Homo sapiens
CARQRYDILTGYEGVYYYYGMDVW

SEQ ID NO: 55674 - protein, 18 aa, Homo sapiens
CATDRAFYGSGPTSFDYW

SEQ ID NO: 55675 - protein, 23 aa, Homo sapiens
CARDSIWVITFGGVIASHAFDIW

SEQ ID NO: 55676 - protein, 17 aa, Homo sapiens
CAKDPHYYHSSPPVDYW

SEQ ID NO: 55677 - protein, 29 aa, Homo sapiens
CAREQLRYFDWSLLLGDPYHDRLDAFDIW

SEQ ID NO: 55678 - protein, 25 aa, Homo sapiens
CARRGYDYGDYVLRGYYYYYGMDVW

SEQ ID NO: 55679 - protein, 13 aa, Homo sapiens
CLHHNSNPPSWTF

SEQ ID NO: 55680 - protein, 23 aa, Homo sapiens
CARSQRAGYYYGSGIQKDAFDIW

SEQ ID NO: 55681 - protein, 16 aa, Homo sapiens
CATRKETYTYGTFDYW

SEQ ID NO: 55682 - protein, 14 aa, Homo sapiens
CAGVSTLVRAHDYW

SEQ ID NO: 55683 - protein, 19 aa, Homo sapiens
CARDEAENTSNYYYGMDVW

SEQ ID NO: 55684 - protein, 26 aa, Homo sapiens
CARDQNASLEWLFGMGRYYYYGMDVW

SEQ ID NO: 55685 - protein, 24 aa, Homo sapiens
CARDPTVTLHDYGDYYYYYGMDVW

SEQ ID NO: 55686 - protein, 19 aa, Homo sapiens
CARFGTTGYYYYYYAMDVW

SEQ ID NO: 55687 - protein, 20 aa, Homo sapiens
CARSLYYDSSGLELNAFDIW

SEQ ID NO: 55688 - protein, 16 aa, Homo sapiens
CTTEETYSGYDFLDYW

SEQ ID NO: 55689 - protein, 20 aa, Homo sapiens
CARHGFIGYSGYDVHAFDIW

SEQ ID NO: 55690 - protein, 25 aa, Homo sapiens
CARGGWVIGYCSSTSCRTPDYFDYW

SEQ ID NO: 55691 - protein, 17 aa, Homo sapiens
CVRESGGAYIPRAFDDW

SEQ ID NO: 55692 - protein, 18 aa, Homo sapiens
CASRGYSSVYYSFYHDYW

SEQ ID NO: 55693 - protein, 16 aa, Homo sapiens
CAREPNYYDIAPGDYW

SEQ ID NO: 55694 - protein, 16 aa, Homo sapiens
CARGPAMVTQGAFDIW

SEQ ID NO: 55695 - protein, 19 aa, Homo sapiens
CAKGARPWGYYYYYGMDVW

SEQ ID NO: 55696 - protein, 22 aa, Homo sapiens
CARWLGLADYSGYDYAYYFDYW

SEQ ID NO: 55697 - protein, 18 aa, Homo sapiens
CARHANVDIVATLYFDYW

SEQ ID NO: 55698 - protein, 19 aa, Homo sapiens
CAKRTQERLVQPNDAFDLW

SEQ ID NO: 55699 - protein, 24 aa, Homo sapiens
CARDPSLYCDGDCYVIAVDAFDMW

SEQ ID NO: 55700 - protein, 21 aa, Homo sapiens
CARGDVGDDSSGYYSYYFDYW

SEQ ID NO: 55701 - protein, 18 aa, Homo sapiens
CATDLDGDYGYYYGMDVW

SEQ ID NO: 55702 - protein, 16 aa, Homo sapiens
CVRERGYSYGLDFDSW

SEQ ID NO: 55703 - protein, 18 aa, Homo sapiens
CARDLNDYGGNSGYFDYW

SEQ ID NO: 55704 - protein, 24 aa, Homo sapiens
CAKDGGTHDYGDYRGYYYYGMDVW

SEQ ID NO: 55705 - protein, 18 aa, Homo sapiens
CSKAGYSSGWYAWGDDYW

SEQ ID NO: 55706 - protein, 16 aa, Homo sapiens
CARRLQMFGSYYFDYW

SEQ ID NO: 55707 - protein, 25 aa, Homo sapiens
CARERGGWFGELLPPTYYYYGMDVW

SEQ ID NO: 55708 - protein, 22 aa, Homo sapiens
CARDHCSGGSCHAFLYDAFDIW

SEQ ID NO: 55709 - protein, 26 aa, Homo sapiens
CARMVPTEYYYDSSGYSQYPGYFDYW

SEQ ID NO: 55710 - protein, 21 aa, Homo sapiens
CARLLQEGDMSSTYFFYFDYW

SEQ ID NO: 55711 - protein, 20 aa, Homo sapiens
CARHHSGYDSGYYYYGMDVW

SEQ ID NO: 55712 - protein, 19 aa, Homo sapiens
CAKVPLLYCSGGSCYLDYW

SEQ ID NO: 55713 - protein, 27 aa, Homo sapiens
CARVPRIGYYYGSGSQLGRLYNWFDPW

SEQ ID NO: 55714 - protein, 29 aa, Homo sapiens
CAREWWAYCSSTSCSEYQTSYYYYGMDVW

SEQ ID NO: 55715 - protein, 21 aa, Homo sapiens
CARHEEAFSSSGYYYYGMDVW

SEQ ID NO: 55716 - protein, 18 aa, Homo sapiens
CARGTQYYDIPYNWFDPW

SEQ ID NO: 55717 - protein, 23 aa, Homo sapiens
CDRIGGLFGELTYYYYYYGMDVW

SEQ ID NO: 55718 - protein, 18 aa, Homo sapiens
CARYVSANYSRYTWIDPW

SEQ ID NO: 55719 - protein, 19 aa, Homo sapiens
CAKGGDPYSSGSPDDFDVW

SEQ ID NO: 55720 - protein, 20 aa, Homo sapiens
CARHYAECSDENCHRWFDPW

SEQ ID NO: 55721 - protein, 17 aa, Homo sapiens
CSSEWTLRPLGFALDVW

SEQ ID NO: 55722 - protein, 20 aa, Homo sapiens
CARAFTSLYHYGSGFWFDPW

SEQ ID NO: 55723 - protein, 18 aa, Homo sapiens
CAKEGQRLSYYYYGLDVW

SEQ ID NO: 55724 - protein, 22 aa, Homo sapiens
CASHGAYYDILTGYYASYFDYW

SEQ ID NO: 55725 - protein, 16 aa, Homo sapiens
CARDEGSGSLLFLDYW

SEQ ID NO: 55726 - protein, 24 aa, Homo sapiens
CARNSGRYYDILTGYSSDWYFDLW

SEQ ID NO: 55727 - protein, 17 aa, Homo sapiens
CAKDPMTTVVTLYFDYW

SEQ ID NO: 55728 - protein, 21 aa, Homo sapiens
CARKRWNYDSSGYYFNWFDPW

SEQ ID NO: 55729 - protein, 16 aa, Homo sapiens
CVKDKAAAGTDSFDYW

SEQ ID NO: 55730 - protein, 12 aa, Homo sapiens [sequence omitted]

SEQ ID NO: 55731 - protein, 18 aa, Homo sapiens
CARASGRKSYYYYGMDVW

SEQ ID NO: 55732 - protein, 16 aa, Homo sapiens
CARRVIVGATTEVDYW

SEQ ID NO: 55733 - protein, 14 aa, Homo sapiens
CAHRHILTGYLRYW

SEQ ID NO: 55734 - protein, 18 aa, Homo sapiens
CAKGGVRGGRPPIYFDYW

SEQ ID NO: 55735 - protein, 19 aa, Homo sapiens
CARVVYGSGNGLGLITDYW

SEQ ID NO: 55736 - protein, 20 aa, Homo sapiens
CARDLVAAAGNYYYYGMDVW

SEQ ID NO: 55737 - protein, 14 aa, Homo sapiens
CAKPHTLGNAFDIW

SEQ ID NO: 55738 - protein, 15 aa, Homo sapiens
CVAFSSGWYGRLDYW

SEQ ID NO: 55739 - protein, 19 aa, Homo sapiens
CARETPLSSSSWIKIFDYW

SEQ ID NO: 55740 - protein, 18 aa, Homo sapiens
CARWNALILTGYYYFDYW

SEQ ID NO: 55741 - protein, 12 aa, Homo sapiens
CQSSDSSPYWLF

SEQ ID NO: 55742 - protein, 22 aa, Homo sapiens
CARSPYYYDSSGYSTSLPFDYW

SEQ ID NO: 55743 - protein, 19 aa, Homo sapiens
CAKEAAVAGNHYYYGMDVW

SEQ ID NO: 55744 - protein, 19 aa, Homo sapiens
CARDDSSSWYGPYWYFDLW

SEQ ID NO: 55745 - protein, 18 aa, Homo sapiens
CARLRKDDNGGYFWFDPW

SEQ ID NO: 55746 - protein, 16 aa, Homo sapiens
CARGEMAFYYYGMDVW

SEQ ID NO: 55747 - protein, 21 aa, Homo sapiens
CTTDRRYDVLTGYYNPQFDYW

SEQ ID NO: 55748 - protein, 13 aa, Homo sapiens
CQQYHRWPPEYTF

SEQ ID NO: 55749 - protein, 20 aa, Homo sapiens
CARHVSSRSSWYYYYGMDVW

SEQ ID NO: 55750 - protein, 23 aa, Homo sapiens
CARVGELYYYDSSGYYGLRFDPW

SEQ ID NO: 55751 - protein, 22 aa, Homo sapiens
CARDIVTYYYGSGSYPDAFDIW

SEQ ID NO: 55752 - protein, 19 aa, Homo sapiens
CAKDTDSSGWYRGDYFDYW

SEQ ID NO: 55753 - protein, 20 aa, Homo sapiens
CARHSLNVLLWFGEGYFDLW

SEQ ID NO: 55754 - protein, 15 aa, Homo sapiens
CASDTGYYYYVMDVW

SEQ ID NO: 55755 - protein, 16 aa, Homo sapiens
CASAYYYDSSVPWDYW

SEQ ID NO: 55756 - protein, 13 aa, Homo sapiens
CATPPYYGDNDYW

SEQ ID NO: 55757 - protein, 16 aa, Homo sapiens
CARVSSTALSYAFDIW

SEQ ID NO: 55758 - protein, 20 aa, Homo sapiens
CARHGAGSRQSYYYYGMDVW

SEQ ID NO: 55759 - protein, 14 aa, Homo sapiens
CVRDVGRGALFDIW

SEQ ID NO: 55760 - protein, 10 aa, Homo sapiens
CMQDAQDSTF

SEQ ID NO: 55761 - protein, 20 aa, Homo sapiens
CASNPGTAMEYYYYYGMDVW

SEQ ID NO: 55762 - protein, 21 aa, Homo sapiens
CATDRYMVRGVGVFFRWFDPW

SEQ ID NO: 55763 - protein, 20 aa, Homo sapiens
CAKHMEDIVVVPAVGAFDIW

SEQ ID NO: 55764 - protein, 21 aa, Homo sapiens
CARGRTVTTFFYPNRNWFDPW

SEQ ID NO: 55765 - protein, 17 aa, Homo sapiens
CASPTRSGSYVGPFDYW

SEQ ID NO: 55766 - protein, 25 aa, Homo sapiens
CARGFNFFYYDILTGYYRSHPFDYW

SEQ ID NO: 55767 - protein, 20 aa, Homo sapiens
CASLSHLYDDCSGYYPLDYW

SEQ ID NO: 55768 - protein, 21 aa, Homo sapiens
CAMGLLSGSPEGNYYYGMDVW

SEQ ID NO: 55769 - protein, 17 aa, Homo sapiens
CARRNRRDGYNYEIDYW

SEQ ID NO: 55770 - protein, 18 aa, Homo sapiens
CARDWRGYGSGSYYIGYW

SEQ ID NO: 55771 - protein, 20 aa, Homo sapiens
CARRGGYDLRLYYYYGMDVW

SEQ ID NO: 55772 - protein, 18 aa, Homo sapiens
CARGPAVRYSGYEADDYW

SEQ ID NO: 55773 - protein, 20 aa, Homo sapiens
CARGLYYYGSGTYYYGMDVW

SEQ ID NO: 55774 - protein, 18 aa, Homo sapiens
CARHPLGGMIETRYFDLW

SEQ ID NO: 55775 - protein, 20 aa, Homo sapiens
CAHRPGIGIIAAAGNYFDYW

SEQ ID NO: 55776 - protein, 27 aa, Homo sapiens
CARVQAENYDILTGYWGRTPNYYFDYW

SEQ ID NO: 55777 - protein, 16 aa, Homo sapiens
CARMNVRVPGLPFDPW

SEQ ID NO: 55778 - protein, 17 aa, Homo sapiens
CARFEHYDSSGYYRDYW

SEQ ID NO: 55779 - protein, 17 aa, Homo sapiens
CARKGITMGSGEYFQHW

SEQ ID NO: 55780 - protein, 22 aa, Homo sapiens
CAKEHDWFQLPHFYYYYGMDVW

SEQ ID NO: 55781 - protein, 16 aa, Homo sapiens
CARHQGGDFTWAFDHW

SEQ ID NO: 55782 - protein, 20 aa, Homo sapiens
CAVLGYSYPSNYYYYGMDVW

SEQ ID NO: 55783 - protein, 22 aa, Homo sapiens
CARPLRITFGGVIVLPDAFDIW

SEQ ID NO: 55784 - protein, 21 aa, Homo sapiens
CARVGAEYSYGHYYYYGMDVW

SEQ ID NO: 55785 - protein, 22 aa, Homo sapiens
CARASWSKGYSSGYYYGAFDIW

SEQ ID NO: 55786 - protein, 21 aa, Homo sapiens
CAKVPSFLTSFYNEEEYSDYW

SEQ ID NO: 55787 - protein, 19 aa, Homo sapiens
CARGEAHYGDYDQVWFDPW

SEQ ID NO: 55788 - protein, 17 aa, Homo sapiens
CARDYDSSGSYPTFDYW

SEQ ID NO: 55789 - protein, 20 aa, Homo sapiens
CARDSVIRYFDWLVGAFDIW

SEQ ID NO: 55790 - protein, 20 aa, Homo sapiens
CASFSSEYYYDSSGYYSDYW

SEQ ID NO: 55791 - protein, 21 aa, Homo sapiens
CTTDFEPVDYYDSSGSGFDYW

SEQ ID NO: 55792 - protein, 24 aa, Homo sapiens
CAREGGCSGSRCYPPGPNDAFDIW

SEQ ID NO: 55793 - protein, 13 aa, Homo sapiens
CQQRSSGPPRLTF

SEQ ID NO: 55794 - protein, 18 aa, Homo sapiens
CARKRRDGYKWDGYFDLW

SEQ ID NO: 55795 - protein, 19 aa, Homo sapiens
CAQTLLLWFGVKELGFDYW

SEQ ID NO: 55796 - protein, 24 aa, Homo sapiens
CAKDMKGSRKWLVPNYNYYGMDVW

SEQ ID NO: 55797 - protein, 15 aa, Homo sapiens
CQAWDSSTASPHWVF

SEQ ID NO: 55798 - protein, 16 aa, Homo sapiens
CARDYDWGSIGAFDPW

SEQ ID NO: 55799 - protein, 21 aa, Homo sapiens
CARMGGSLVAVRGYYYGMDVW

SEQ ID NO: 55800 - protein, 23 aa, Homo sapiens
CARDPTLTTVTTMGYYYYGMDVW

SEQ ID NO: 55801 - protein, 23 aa, Homo sapiens
CAREQYNWSPSLTYYYYYGMDVW

SEQ ID NO: 55802 - protein, 22 aa, Homo sapiens
CARTPADYYDSSGYLDYYFDYW

SEQ ID NO: 55803 - protein, 21 aa, Homo sapiens
CARRGTYDYVWGSPPEWFDPW

SEQ ID NO: 55804 - protein, 22 aa, Homo sapiens
CARQQYYYGSGSYYQTYYFDYW

SEQ ID NO: 55805 - protein, 15 aa, Homo sapiens
CASVKQWLPRYFDYW

SEQ ID NO: 55806 - protein, 20 aa, Homo sapiens
CARLEGDSSGWYNPYYFDYW

SEQ ID NO: 55807 - protein, 20 aa, Homo sapiens
CAKYGPYTSTSGGQREFDSW

SEQ ID NO: 55808 - protein, 18 aa, Homo sapiens
CTRQGRSSSWWDYAMDVW

SEQ ID NO: 55809 - protein, 17 aa, Homo sapiens
CARDLSSSWAEYYFDYW

SEQ ID NO: 55810 - protein, 19 aa, Homo sapiens
CAPQGRSSSWDTYNWFDPW

SEQ ID NO: 55811 - protein, 23 aa, Homo sapiens
CARSESITMIVVNQYYYYGMDVW

SEQ ID NO: 55812 - protein, 18 aa, Homo sapiens
CARVIDYYDSSEGAFDIW

SEQ ID NO: 55813 - protein, 17 aa, Homo sapiens
CARGGNGLWLRAPFDYW

SEQ ID NO: 55814 - protein, 16 aa, Homo sapiens
CAHRHAIVAQAYFDYW

SEQ ID NO: 55815 - protein, 12 aa, Homo sapiens
CAHRHGVVVDYW

SEQ ID NO: 55816 - protein, 17 aa, Homo sapiens
CAKRSAYYPQLDSFDIW

SEQ ID NO: 55817 - protein, 23 aa, Homo sapiens
CASIPQGVVVAAIDYGDYHFDYW

SEQ ID NO: 55818 - protein, 21 aa, Homo sapiens
CARGGGYNSWGVLAVDAFDIW

SEQ ID NO: 55819 - protein, 17 aa, Homo sapiens
CAKTGDYYDSTGYLDSW

SEQ ID NO: 55820 - protein, 15 aa, Homo sapiens
CAREVDSYHDAFDIW

SEQ ID NO: 55821 - protein, 24 aa, Homo sapiens
CAREVHRYYYDSSGYYYNDAFDIW

SEQ ID NO: 55822 - protein, 16 aa, Homo sapiens
CARGDSSWFNYYFDYW

SEQ ID NO: 55823 - protein, 16 aa, Homo sapiens
CARDKRDDYPDAFDIW

SEQ ID NO: 55824 - protein, 15 aa, Homo sapiens
CAKGGELLRSWFAPW

SEQ ID NO: 55825 - protein, 28 aa, Homo sapiens
CARDPILWFGELFKKGTPSRYYYGMDVW

SEQ ID NO: 55826 - protein, 17 aa, Homo sapiens
CARTMIVLNGDWYFDLW

SEQ ID NO: 55827 - protein, 18 aa, Homo sapiens
CARSYSWESSYVAFLDYW

SEQ ID NO: 55828 - protein, 15 aa, Homo sapiens
CARLLTGYNEVFDIW

SEQ ID NO: 55829 - protein, 13 aa, Homo sapiens
CARNHDDSRFDSW

SEQ ID NO: 55830 - protein, 24 aa, Homo sapiens
CARLPLPSGYSYGYTYYYYGMDVW

SEQ ID NO: 55831 - protein, 22 aa, Homo sapiens
CAKTQYVWGSWGLKESSAFDIW

SEQ ID NO: 55832 - protein, 23 aa, Homo sapiens
CARDWRYYDSSGYYGSSETFDYW

SEQ ID NO: 55833 - protein, 13 aa, Homo sapiens
CAHYIAVAPLDYW

SEQ ID NO: 55834 - protein, 15 aa, Homo sapiens
CARDQHGDSWAFDYW

SEQ ID NO: 55835 - protein, 18 aa, Homo sapiens
CAREKDAHFGTPSTADYW

SEQ ID NO: 55836 - protein, 16 aa, Homo sapiens
CAKGRRSGSRDAFDMW

SEQ ID NO: 55837 - protein, 26 aa, Homo sapiens
CAHRPLNAGNYYDSSGGFREVLFDYW

SEQ ID NO: 55838 - protein, 16 aa, Homo sapiens
CARGGYFDWSNWFDPW

SEQ ID NO: 55839 - protein, 24 aa, Homo sapiens
CARGEEMATISSGWGHYYYGMDVW

SEQ ID NO: 55840 - protein, 21 aa, Homo sapiens
CASSWYYDSSGFEPGNAFDIW

SEQ ID NO: 55841 - protein, 24 aa, Homo sapiens
CTTDATITGDYYDSSDYTEFFDYW

SEQ ID NO: 55842 - protein, 17 aa, Homo sapiens
CAKMDIVATIIGRFDFW

SEQ ID NO: 55843 - protein, 23 aa, Homo sapiens
CAKAQCSSTSCSPFYYYYGMDVW

SEQ ID NO: 55844 - protein, 25 aa, Homo sapiens
CARQAGYYDSSGYYYVEWAGAFDIW

SEQ ID NO: 55845 - protein, 19 aa, Homo sapiens
CARHGKIAVHISGLWFDYW

SEQ ID NO: 55846 - protein, 20 aa, Homo sapiens
CARIRVTTLPYYYYYGMDVW

SEQ ID NO: 55847 - protein, 19 aa, Homo sapiens
CAKDPLTVAVPNKDWFDPW

SEQ ID NO: 55848 - protein, 17 aa, Homo sapiens
CARSSVAWFGPNEFHPW

SEQ ID NO: 55849 - protein, 25 aa, Homo sapiens
CARQSRTHCSGGSCYSDYYYGMDVW

SEQ ID NO: 55850 - protein, 23 aa, Homo sapiens
CARDQFVVVPAARYYYYYGMDVW

SEQ ID NO: 55851 - protein, 21 aa, Homo sapiens
CASSYDILTGYYGIGDAFDIW

SEQ ID NO: 55852 - protein, 19 aa, Homo sapiens
CARDLRRGYSSSNDAFDIW

SEQ ID NO: 55853 - protein, 25 aa, Homo sapiens
CVRPTYSYGSDNYYNVVAWGWIDPW

SEQ ID NO: 55854 - protein, 25 aa, Homo sapiens
CATNHRLGAQANYYYDSSGYYFDYW

SEQ ID NO: 55855 - protein, 18 aa, Homo sapiens
CARHRREGPRAASYFDSW

SEQ ID NO: 55856 - protein, 13 aa, Homo sapiens
CHVWDSVSDHQVF

SEQ ID NO: 55857 - protein, 23 aa, Homo sapiens
CARVGYSYGYYRSYYYYYGMDVW

SEQ ID NO: 55858 - protein, 18 aa, Homo sapiens
CARVGSGYDSWAVYFDYW

SEQ ID NO: 55859 - protein, 18 aa, Homo sapiens
CAHRPFSSWYAAGAFDIW

SEQ ID NO: 55860 - protein, 19 aa, Homo sapiens
CASSRLYSSGYHDDAFDIW

SEQ ID NO: 55861 - protein, 22 aa, Homo sapiens
CAKDRITMIVVTITPPDAFDVW

SEQ ID NO: 55862 - protein, 17 aa, Homo sapiens
CARDRDEEQQLELFDYW

SEQ ID NO: 55863 - protein, 19 aa, Homo sapiens
CAKDRTPMITFGGVIIDYW

SEQ ID NO: 55864 - protein, 22 aa, Homo sapiens
CAKMASGLFEWLLPKYWYFDLW

SEQ ID NO: 55865 - protein, 16 aa, Homo sapiens
CARARTPNENNAFDIW

SEQ ID NO: 55866 - protein, 18 aa, Homo sapiens
CARGGDTAMVVQVWFDPW

SEQ ID NO: 55867 - protein, 19 aa, Homo sapiens
CAKDSVQWDQPRVYYFDYW

SEQ ID NO: 55868 - protein, 17 aa, Homo sapiens
CARAFGGGYVRSPFDYW

SEQ ID NO: 55869 - protein, 22 aa, Homo sapiens
CARGLTPYDYVWGSYLVYFDYW

SEQ ID NO: 55870 - protein, 16 aa, Homo sapiens
CSRVNSAYGLSYLDYW

SEQ ID NO: 55871 - protein, 17 aa, Homo sapiens
CARDLYDISGNFYFDSW

SEQ ID NO: 55872 - protein, 20 aa, Homo sapiens
CARGAYGAFPKYYYYGMDVW

SEQ ID NO: 55873 - protein, 15 aa, Homo sapiens
CVKETSIIRGIFDYW

SEQ ID NO: 55874 - protein, 18 aa, Homo sapiens
CARDRDPAAPSWNWFDPW

SEQ ID NO: 55875 - protein, 22 aa, Homo sapiens
CARGLFDYGLSLLRTQQVFDYW

SEQ ID NO: 55876 - protein, 22 aa, Homo sapiens
CAREQRATGYCSGGSCNWFDPW

SEQ ID NO: 55877 - protein, 30 aa, Homo sapiens
CARDIGYYYGSGSYYTRENYQYYYYGMDVW

SEQ ID NO: 55878 - protein, 17 aa, Homo sapiens
CSSGYHSYHFPSDLDYW

SEQ ID NO: 55879 - protein, 26 aa, Homo sapiens
CVRDLGSSDPQWGYLSYHQYYALDVW

SEQ ID NO: 55880 - protein, 23 aa, Homo sapiens
CAKDRWYSSGLQSIYHYYGMDVW

SEQ ID NO: 55881 - protein, 14 aa, Homo sapiens
CARAAAGDWYFDLW

SEQ ID NO: 55882 - protein, 19 aa, Homo sapiens
CATATPMLGLGANNWFDPW

SEQ ID NO: 55883 - protein, 21 aa, Homo sapiens
CARMGVLRGDVMTTIDGFDLW

SEQ ID NO: 55884 - protein, 16 aa, Homo sapiens
CAREYSSSWYLGYDYW

SEQ ID NO: 55885 - protein, 16 aa, Homo sapiens
CARRPYTSNQFTFDNW

SEQ ID NO: 55886 - protein, 22 aa, Homo sapiens
CARAYYDYVWGSRETNYYFDYW

SEQ ID NO: 55887 - protein, 17 aa, Homo sapiens
CARVGTPGWYGFPFDSW

SEQ ID NO: 55888 - protein, 27 aa, Homo sapiens
CARDSFMYYDILTGYYRSYYYYGMDVW

SEQ ID NO: 55889 - protein, 17 aa, Homo sapiens
CTRVQRALAGTGYFDFW

SEQ ID NO: 55890 - protein, 21 aa, Homo sapiens
CAREIRALLWFGEINWYFDLW

SEQ ID NO: 55891 - protein, 17 aa, Homo sapiens
CAKGLRPLIVGATCDYW

SEQ ID NO: 55892 - protein, 18 aa, Homo sapiens
CARTYWDYDSRENAFDIW

SEQ ID NO: 55893 - protein, 20 aa, Homo sapiens
CARDGRPHKYGGNPYVFDYW

SEQ ID NO: 55894 - protein, 17 aa, Homo sapiens
CARPITMVRGTDAFDIW

SEQ ID NO: 55895 - protein, 21 aa, Homo sapiens
CAKDGDILRYFDWTPKYFDSW

SEQ ID NO: 55896 - protein, 18 aa, Homo sapiens
CAREPPYREVAGTYWDYW

SEQ ID NO: 55897 - protein, 24 aa, Homo sapiens
CARQKGYCSGGSCYSSFHDAFDIW

SEQ ID NO: 55898 - protein, 20 aa, Homo sapiens
CTTDTLYYDYVWGSLGYDYW

SEQ ID NO: 55899 - protein, 22 aa, Homo sapiens
CARGNFDWLLPLHYYYYGMDVW

SEQ ID NO: 55900 - protein, 18 aa, Homo sapiens
CARVRVWGSYRYSPFDCW

SEQ ID NO: 55901 - protein, 21 aa, Homo sapiens
CARAILWFGELSTADGYFDYW

SEQ ID NO: 55902 - protein, 13 aa, Homo sapiens
CARASTIVANDYW

SEQ ID NO: 55903 - protein, 21 aa, Homo sapiens
CARDAPMCSSTSCYRGWFDYW

SEQ ID NO: 55904 - protein, 21 aa, Homo sapiens
CARDRSETDGDYEYDDAFDIW

SEQ ID NO: 55905 - protein, 23 aa, Homo sapiens
CARGGGGASGYTYYYYSYGMDVW

SEQ ID NO: 55906 - protein, 17 aa, Homo sapiens
CARDPAPYGDYVGDDYW

SEQ ID NO: 55907 - protein, 20 aa, Homo sapiens
CARVVGDQYKLGSPPIFDVW

SEQ ID NO: 55908 - protein, 23 aa, Homo sapiens
CACQRGYSYGWPTTYYYYGMDVW

SEQ ID NO: 55909 - protein, 18 aa, Homo sapiens
CARDAVGATVPDDAFDIW

SEQ ID NO: 55910 - protein, 16 aa, Homo sapiens
CAKDSYGSWTHPIDYW

SEQ ID NO: 55911 - protein, 25 aa, Homo sapiens
CARGDLLGSGSYYNDYLYYYGMDVW

SEQ ID NO: 55912 - protein, 32 aa, Homo sapiens
CSLKASDTAMYYCASSYYYGSGSYYPYYFDYW

SEQ ID NO: 55913 - protein, 23 aa, Homo sapiens
CTTALYDYGDYDDLEDHYYFDYW

SEQ ID NO: 55914 - protein, 17 aa, Homo sapiens
CAKTSITMIVALTFDYW

SEQ ID NO: 55915 - protein, 20 aa, Homo sapiens
CARRRYSSSWLLGGNWFDPW

SEQ ID NO: 55916 - protein, 26 aa, Homo sapiens
CAKDSMGTPEQLWSVFSGYYYGMDVW

SEQ ID NO: 55917 - protein, 17 aa, Homo sapiens
CVKDAFDYGDYTYFDHW

SEQ ID NO: 55918 - protein, 16 aa, Homo sapiens
CYSTDSSGNHNLNWVF

SEQ ID NO: 55919 - protein, 18 aa, Homo sapiens
CAKTAATRWLQSYYFDYW

SEQ ID NO: 55920 - protein, 25 aa, Homo sapiens
CASSIAAGPVTNNQGYYYYYGMDVW

SEQ ID NO: 55921 - protein, 18 aa, Homo sapiens
CARGRSSGWPMESWFDPW

SEQ ID NO: 55922 - protein, 16 aa, Homo sapiens
CATDLGGIGLVIFDYW

SEQ ID NO: 55923 - protein, 20 aa, Homo sapiens
CGYCSSTSCHTYYYYGMDVW

SEQ ID NO: 55924 - protein, 17 aa, Homo sapiens
CAHRTMGTMWGPYFDYW

SEQ ID NO: 55925 - protein, 16 aa, Homo sapiens
CASSMTGGYSAPFDYW

SEQ ID NO: 55926 - protein, 16 aa, Homo sapiens
CARDRYGPFSYAFDIW

SEQ ID NO: 55927 - protein, 19 aa, Homo sapiens
CAKDFRGSSSWYPNYFDYW

SEQ ID NO: 55928 - protein, 21 aa, Homo sapiens
CARGAAMAPGTYYYYYGMDVW

SEQ ID NO: 55929 - protein, 22 aa, Homo sapiens
CARAPARPHPYYYDSSGYFDYW

SEQ ID NO: 55930 - protein, 13 aa, Homo sapiens
CARGELWFRFDYW

SEQ ID NO: 55931 - protein, 17 aa, Homo sapiens
CARIKPGYSGYDPFDYW

SEQ ID NO: 55932 - protein, 24 aa, Homo sapiens
CAKDGDYYDSSGYYGRPNWYFDLW

SEQ ID NO: 55933 - protein, 12 aa, Homo sapiens
CAGEDSARFDPW

SEQ ID NO: 55934 - protein, 16 aa, Homo sapiens
CAREYYYDTSGKFDYW

SEQ ID NO: 55935 - protein, 16 aa, Homo sapiens
CAKDIAVAGKSMFDYW

SEQ ID NO: 55936 - protein, 17 aa, Homo sapiens
CARVGYSSGYYFPGDYW

SEQ ID NO: 55937 - protein, 29 aa, Homo sapiens
CARDQYCSSTSCYGGSEDDYYYYYGMDVW

SEQ ID NO: 55938 - protein, 18 aa, Homo sapiens
CVRDLPFGELLTSIFDYW

SEQ ID NO: 55939 - protein, 15 aa, Homo sapiens
CNSRDSSGKNANWVF

SEQ ID NO: 55940 - protein, 17 aa, Homo sapiens
CARPHGYGDYYDAFDIW

SEQ ID NO: 55941 - protein, 29 aa, Homo sapiens
CARDMNYYDSSGYYYRPVAYYYYYGMDVW

SEQ ID NO: 55942 - protein, 21 aa, Homo sapiens
CARVEYCGGDCYRAEVDFDIW

SEQ ID NO: 55943 - protein, 21 aa, Homo sapiens
CATDSYTVTIPDYYYYGMDVW

SEQ ID NO: 55944 - protein, 20 aa, Homo sapiens
CARGRFYSGWFGSKYYFDYW

SEQ ID NO: 55945 - protein, 21 aa, Homo sapiens
CASLGRRYYDILTGYYFIDYW

SEQ ID NO: 55946 - protein, 21 aa, Homo sapiens
CVRMGWPGWGSKGDDYHFDLW

SEQ ID NO: 55947 - protein, 21 aa, Homo sapiens
CTRVKRDYGSYFGSGSYLDNW

SEQ ID NO: 55948 - protein, 20 aa, Homo sapiens
CAKAAAPYSSGWYLPHFDYW

SEQ ID NO: 55949 - protein, 22 aa, Homo sapiens
CAKDWWESSSSHDYYYYGMDVW

SEQ ID NO: 55950 - protein, 13 aa, Homo sapiens
CARDMSFGSADYW

SEQ ID NO: 55951 - protein, 21 aa, Homo sapiens
CARAPPDQSDSSGFVYFFDQW

SEQ ID NO: 55952 - protein, 19 aa, Homo sapiens
CARFRGWSAYYYYYGMDVW

SEQ ID NO: 55953 - protein, 19 aa, Homo sapiens
CATDQTPAMDYYYYGMDVW

SEQ ID NO: 55954 - protein, 17 aa, Homo sapiens
CAKVVWGSGWYGSVDYW

SEQ ID NO: 55955 - protein, 17 aa, Homo sapiens
CVRPKYSASWPEAFDIW

SEQ ID NO: 55956 - protein, 31 aa, Homo sapiens
CTTENWELSYDYDEYVQDSSQYYKSYGMDVW

SEQ ID NO: 55957 - protein, 7 aa, Homo sapiens
CVYRPYW

SEQ ID NO: 55958 - protein, 25 aa, Homo sapiens
CARDGGRYYYDSSGSEDLEGWFDPW

SEQ ID NO: 55959 - protein, 22 aa, Homo sapiens
CARDMVRGVIIPSYYYYGMDVW

SEQ ID NO: 55960 - protein, 17 aa, Homo sapiens
CARVPVWTTTLGAFDIW

SEQ ID NO: 55961 - protein, 23 aa, Homo sapiens
CARDLANYDILTGYYYYYGMDVW

SEQ ID NO: 55962 - protein, 29 aa, Homo sapiens
CARIRWVPNYYDSSGYYYGGYYYYGMDVW

SEQ ID NO: 55963 - protein, 25 aa, Homo sapiens
CAKLPTSQQYSGYDLIPRDDAFDIW

SEQ ID NO: 55964 - protein, 18 aa, Homo sapiens
CATTPRLDLGRSWSFDYW

SEQ ID NO: 55965 - protein, 24 aa, Homo sapiens
CAKLFVFKATLLWFPGDLYYFDNW

SEQ ID NO: 55966 - protein, 18 aa, Homo sapiens
CAHTLVPEGMTGRGFDYW

SEQ ID NO: 55967 - protein, 19 aa, Homo sapiens
CAREVSGGSGYYTGPIDYW

SEQ ID NO: 55968 - protein, 23 aa, Homo sapiens
CARGALAIVLAVAGHYYYGMDVW

SEQ ID NO: 55969 - protein, 20 aa, Homo sapiens
CASLGLWPGSTLQWGYFEYW

SEQ ID NO: 55970 - protein, 21 aa, Homo sapiens
CARTSNDCGGDCYYGDYFDYW

SEQ ID NO: 55971 - protein, 15 aa, Homo sapiens
CARQSNALMTTADYW

SEQ ID NO: 55972 - protein, 18 aa, Homo sapiens
CARGLSGYNRAYIAFDIW

SEQ ID NO: 55973 - protein, 16 aa, Homo sapiens
CARQDGGTYYVAFDVW

SEQ ID NO: 55974 - protein, 16 aa, Homo sapiens
CAREMRGYSSGGYDYW

SEQ ID NO: 55975 - protein, 17 aa, Homo sapiens
CAKVRGYGGTLLGGDYW

SEQ ID NO: 55976 - protein, 22 aa, Homo sapiens
CARIRRSESIPAAGTGGNFDYW

SEQ ID NO: 55977 - protein, 24 aa, Homo sapiens
CARGGWGSYGSGSNRAIRPDFDYW

SEQ ID NO: 55978 - protein, 25 aa, Homo sapiens
CAREAYYYGSGSYPRFYYYYGMDVW

SEQ ID NO: 55979 - protein, 27 aa, Homo sapiens
CARLIPDYDILTGYGAENYYYYGMDVW

SEQ ID NO: 55980 - protein, 17 aa, Homo sapiens
CASYVRQWLADEAFDIW

SEQ ID NO: 55981 - protein, 21 aa, Homo sapiens
CARDLSGDSSGYPNDNWFDPW

SEQ ID NO: 55982 - protein, 15 aa, Homo sapiens
CAKISPEMRGAFDIW

SEQ ID NO: 55983 - protein, 17 aa, Homo sapiens
CARIVVVITTSLDFDYW

SEQ ID NO: 55984 - protein, 22 aa, Homo sapiens
CARGGYSYGGVGGYYYYGMDVW

SEQ ID NO: 55985 - protein, 18 aa, Homo sapiens
CARGGDYSDSSGSEFDSW

SEQ ID NO: 55986 - protein, 22 aa, Homo sapiens
CATSGIAAADPLNYYYYGMDVW

SEQ ID NO: 55987 - protein, 19 aa, Homo sapiens
CARDYAWFGELSGVSFDYW

SEQ ID NO: 55988 - protein, 19 aa, Homo sapiens
CARYYYYDSSGYLSAFDIW

SEQ ID NO: 55989 - protein, 17 aa, Homo sapiens
CAREANYYDIERFFDYW

SEQ ID NO: 55990 - protein, 24 aa, Homo sapiens
CARGLEPVTWIQLWLERGDAFDIW

SEQ ID NO: 55991 - protein, 15 aa, Homo sapiens
CARQGGSGSGWIDYW

SEQ ID NO: 55992 - protein, 21 aa, Homo sapiens
CARAIRGLLWFGELLGYFDYW

SEQ ID NO: 55993 - protein, 22 aa, Homo sapiens
CARGLWRTGTKLGYYYYGMDVW

SEQ ID NO: 55994 - protein, 17 aa, Homo sapiens
CARDGSYSPRYDAFDIW

SEQ ID NO: 55995 - protein, 20 aa, Homo sapiens
CARELVYCGGDCYSTAFDIW

SEQ ID NO: 55996 - protein, 18 aa, Homo sapiens
CATLIDSSGFLDWYFDLW

SEQ ID NO: 55997 - protein, 14 aa, Homo sapiens
CAKVQGSLDYGDYW

SEQ ID NO: 55998 - protein, 23 aa, Homo sapiens
CARDGASVGSGWSIDYYYGMDVW

SEQ ID NO: 55999 - protein, 20 aa, Homo sapiens
CAKDRPPLFGGVIVDAFDIW

SEQ ID NO: 56000 - protein, 25 aa, Homo sapiens
CARAVGEGSSGWFSPYYYYYGMDVW

SEQ ID NO: 56001 - protein, 16 aa, Homo sapiens
CARISFGDYGLYFDFW

SEQ ID NO: 56002 - protein, 20 aa, Homo sapiens
CARGSSGSSWFRRYNWFDPW

SEQ ID NO: 56003 - protein, 18 aa, Homo sapiens
CAKGVHGYYDSSGYSDFW

SEQ ID NO: 56004 - protein, 16 aa, Homo sapiens
CARHKGGDYDRAFDIW

SEQ ID NO: 56005 - protein, 18 aa, Homo sapiens
CAREAETPINKWYYFDYW

SEQ ID NO: 56006 - protein, 22 aa, Homo sapiens
CARFTTYYYDSSGSWVEYFDYW

SEQ ID NO: 56007 - protein, 19 aa, Homo sapiens
CAHSSYDILTGYYQSLDYW

SEQ ID NO: 56008 - protein, 13 aa, Homo sapiens
CSSTSCSDAFDIW

SEQ ID NO: 56009 - protein, 21 aa, Homo sapiens
CARARGTGYSSGWDAERFDYW

SEQ ID NO: 56010 - protein, 23 aa, Homo sapiens
CAREDGYFDWIGGGYYYYGMDVW

SEQ ID NO: 56011 - protein, 12 aa, Homo sapiens
CHQYYSIPQKTF

SEQ ID NO: 56012 - protein, 23 aa, Homo sapiens
CARDRGPLWQQLVRYYYYGMDVW

SEQ ID NO: 56013 - protein, 17 aa, Homo sapiens
CAKDRQRNREDFYFDSW

SEQ ID NO: 56014 - protein, 22 aa, Homo sapiens
CARVVAGFRLFEPTYYYGMDVW

SEQ ID NO: 56015 - protein, 24 aa, Homo sapiens
CARDRGVLWFGELLGAAFNWFDPW

SEQ ID NO: 56016 - protein, 17 aa, Homo sapiens
CAKKGGGSGWSQYFDSW

SEQ ID NO: 56017 - protein, 27 aa, Homo sapiens
CATDHGVFGNSSSWLTPYYYYYGMDVW

SEQ ID NO: 56018 - protein, 15 aa, Homo sapiens
CARYPSGVPGYFDYW

SEQ ID NO: 56019 - protein, 17 aa, Homo sapiens
CASGHGSSGYFDAFDIW

SEQ ID NO: 56020 - protein, 20 aa, Homo sapiens
CATDPTTPPLNYYYYGMDVW

SEQ ID NO: 56021 - protein, 20 aa, Homo sapiens
CARDRGHHYDYVWGSAFDIW

SEQ ID NO: 56022 - protein, 20 aa, Homo sapiens
CARGGDIMEVVAATEGFDIW

SEQ ID NO: 56023 - protein, 18 aa, Homo sapiens
CAKDMVRGVLIGQQFDYW

SEQ ID NO: 56024 - protein, 21 aa, Homo sapiens
CARESWGSGWTSDYYYGMDVW

SEQ ID NO: 56025 - protein, 18 aa, Homo sapiens
CARTVVDSYTSTGWFDPW

SEQ ID NO: 56026 - protein, 16 aa, Homo sapiens
CARCDSSWYREAFDFW

SEQ ID NO: 56027 - protein, 17 aa, Homo sapiens
CARCGIQLWFSGAFDIW

SEQ ID NO: 56028 - protein, 14 aa, Homo sapiens
CATVSGAALWFDYW

SEQ ID NO: 56029 - protein, 15 aa, Homo sapiens
CAREGTWPDGYIDYW

SEQ ID NO: 56030 - protein, 19 aa, Homo sapiens
CARARLEAWELLFYYFDYW

SEQ ID NO: 56031 - protein, 14 aa, Homo sapiens
CVHIRPGTLVFDYW

SEQ ID NO: 56032 - protein, 20 aa, Homo sapiens
CTRNSISDIDYADPQDFDYW

SEQ ID NO: 56033 - protein, 21 aa, Homo sapiens
CASMESGDGYNLGYYYGMDVW

SEQ ID NO: 56034 - protein, 22 aa, Homo sapiens
CANRFQIDYYETSGSFEAFEIW

SEQ ID NO: 56035 - protein, 21 aa, Homo sapiens
CVRDGAVRGYSGYDYLPFDSW

SEQ ID NO: 56036 - protein, 22 aa, Homo sapiens
CAKGRYYDSSGYYFLGSPFDYW

SEQ ID NO: 56037 - protein, 20 aa, Homo sapiens
CARLMTGELFSYYYYGMDVW

SEQ ID NO: 56038 - protein, 16 aa, Homo sapiens
CARESGWLQLNAFDIW

SEQ ID NO: 56039 - protein, 16 aa, Homo sapiens
CASSGSSWYANWFDPW

SEQ ID NO: 56040 - protein, 27 aa, Homo sapiens
CAKDWGGGGLVGGLYGDYAVYNWFDPW

SEQ ID NO: 56041 - protein, 19 aa, Homo sapiens
CATSSPRIVVVMGPWFDPW

SEQ ID NO: 56042 - protein, 19 aa, Homo sapiens
CARGEYEWLRLRGNWFDPW

SEQ ID NO: 56043 - protein, 15 aa, Homo sapiens
CATRGPLHPGWFDPW

SEQ ID NO: 56044 - protein, 34 aa, Homo sapiens
CALPISDTAMYYCARRFYPDSSGYYFFEYYFDYW

SEQ ID NO: 56045 - protein, 16 aa, Homo sapiens
CAHRGHWSEGSAFDIW

SEQ ID NO: 56046 - protein, 17 aa, Homo sapiens
CATVRTYSSSWSYFDYW

SEQ ID NO: 56047 - protein, 24 aa, Homo sapiens
CAHSIAAAGTDSNYYYYYYGMDVW

SEQ ID NO: 56048 - protein, 19 aa, Homo sapiens
CAREFYYGSGSYPDIHDYW

SEQ ID NO: 56049 - protein, 13 aa, Homo sapiens
CARGFIGGPFNYW

SEQ ID NO: 56050 - protein, 17 aa, Homo sapiens
CAKDSHIVVVTAIPDYW

SEQ ID NO: 56051 - protein, 17 aa, Homo sapiens
CARAQDMTTVISPFDYW

SEQ ID NO: 56052 - protein, 17 aa, Homo sapiens
CARESIDGDYDSGIDYW

SEQ ID NO: 56053 - protein, 20 aa, Homo sapiens
CARDQDEYDSSLYYYGMDVW

SEQ ID NO: 56054 - protein, 21 aa, Homo sapiens
CAHTADSCDGVNCYRSDFDYW

SEQ ID NO: 56055 - protein, 22 aa, Homo sapiens
CARETRYFDWLLQTPTYAFDIW

SEQ ID NO: 56056 - protein, 17 aa, Homo sapiens
CAREHTVPVPRGWFDPW

SEQ ID NO: 56057 - protein, 23 aa, Homo sapiens
CARSADIVVVPAAIRVLSYFDYW

SEQ ID NO: 56058 - protein, 19 aa, Homo sapiens
CAKDNKWLANYYYYGMDVW

SEQ ID NO: 56059 - protein, 25 aa, Homo sapiens
CARIKLDRYYDSSGYYYAEYYFDYW

SEQ ID NO: 56060 - protein, 24 aa, Homo sapiens
CARDSPYCSGGSCYPGIWFSFDYW

SEQ ID NO: 56061 - protein, 21 aa, Homo sapiens
CARGERGGSGSYRSLHVGDYW

SEQ ID NO: 56062 - protein, 28 aa, Homo sapiens
CAKAQIASYDSSGYYYYSYYYYYGMDVW

SEQ ID NO: 56063 - protein, 22 aa, Homo sapiens
CAKASFRYYYDSSGYYSYFDYW

SEQ ID NO: 56064 - protein, 22 aa, Homo sapiens
CARIGFTMVRGVIITRDWFDPW

SEQ ID NO: 56065 - protein, 22 aa, Homo sapiens
CAKDSTPSGELWFDFSLYFDYW

SEQ ID NO: 56066 - protein, 21 aa, Homo sapiens
CVALYSYTPYSSGYYEPFDYW

SEQ ID NO: 56067 - protein, 20 aa, Homo sapiens
CAREGHFDWFIINGGYFDYW

SEQ ID NO: 56068 - protein, 21 aa, Homo sapiens
CARHFSQRLARGGYYYGMDVW

SEQ ID NO: 56069 - protein, 16 aa, Homo sapiens
CARYMTSVDASGFDIW

SEQ ID NO: 56070 - protein, 17 aa, Homo sapiens
CANGPLPGYGSGTDDYW

SEQ ID NO: 56071 - protein, 16 aa, Homo sapiens
CAKLSPVVTPSYFDYW

SEQ ID NO: 56072 - protein, 17 aa, Homo sapiens
CAKAYLGEWELLPFDYW

SEQ ID NO: 56073 - protein, 22 aa, Homo sapiens
CAKGCNSKWFGELYDPGCVDYW

SEQ ID NO: 56074 - protein, 16 aa, Homo sapiens
CAKDGGSTWPYFFDFW

SEQ ID NO: 56075 - protein, 19 aa, Homo sapiens
CARTWYSSSWYGDHWFDPW

SEQ ID NO: 56076 - protein, 18 aa, Homo sapiens
CARGFADYGDSGGTFDYW

SEQ ID NO: 56077 - protein, 15 aa, Homo sapiens
CAKGDDWGSGAFDIW

SEQ ID NO: 56078 - protein, 20 aa, Homo sapiens
CAKDGRSGYYYEDHDAFDIW

SEQ ID NO: 56079 - protein, 21 aa, Homo sapiens
CARVARIYYYGSGTSNWFDPW

SEQ ID NO: 56080 - protein, 19 aa, Homo sapiens
CVKGINAGNALHYDAFDIW

SEQ ID NO: 56081 - protein, 21 aa, Homo sapiens
CARDVPVVVVAATGDDAFDIW

SEQ ID NO: 56082 - protein, 20 aa, Homo sapiens
CARRVPAAIFQGYYYGMDVW

SEQ ID NO: 56083 - protein, 15 aa, Homo sapiens
CATEDTGGMRRFDYW

SEQ ID NO: 56084 - protein, 19 aa, Homo sapiens
CARSMVRGVIITRGEFDYW

SEQ ID NO: 56085 - protein, 19 aa, Homo sapiens
CAREGGGPSTFGGVSPDYW

SEQ ID NO: 56086 - protein, 20 aa, Homo sapiens
CARGRRCESNSCSYDAFDVW

SEQ ID NO: 56087 - protein, 17 aa, Homo sapiens
CARGTRTLNYEYHWDYW

SEQ ID NO: 56088 - protein, 16 aa, Homo sapiens
CARVPPRYSGYVFSYW

SEQ ID NO: 56089 - protein, 19 aa, Homo sapiens
CARAHVGVGYSYSNWFDPW

SEQ ID NO: 56090 - protein, 20 aa, Homo sapiens
CARGLMRLRLFDYYYGMDVW

SEQ ID NO: 56091 - protein, 20 aa, Homo sapiens
CARDHGIPYYGSVDWYFDLW

SEQ ID NO: 56092 - protein, 16 aa, Homo sapiens
CARGPGGSGYYVGDYW

SEQ ID NO: 56093 - protein, 27 aa, Homo sapiens
CARDPGPKRYFDWLLHSDYYYYGMDVW

SEQ ID NO: 56094 - protein, 17 aa, Homo sapiens
CATWHFDWLFSPFFDYW

SEQ ID NO: 56095 - protein, 17 aa, Homo sapiens
CARGDQRYYDWLSFDYW

SEQ ID NO: 56096 - protein, 23 aa, Homo sapiens
CARDWVVVGLWFGELYSGAFDIW

SEQ ID NO: 56097 - protein, 21 aa, Homo sapiens
CARGLRGYYYGSGALYYFDYW

SEQ ID NO: 56098 - protein, 16 aa, Homo sapiens
CARDRFGEIDNAFDIW

SEQ ID NO: 56099 - protein, 19 aa, Homo sapiens
CAKGSSSLRYFDWLPIDYW

SEQ ID NO: 56100 - protein, 17 aa, Homo sapiens
CVHNFYYGSGNSNFEYW

SEQ ID NO: 56101 - protein, 24 aa, Homo sapiens
CARTSSFDLLTGYKNFGLYYFDHW

SEQ ID NO: 56102 - protein, 16 aa, Homo sapiens
CAKAPTTVTAQPFDKW

SEQ ID NO: 56103 - protein, 25 aa, Homo sapiens
CAKVFNYYGSGSYYNDYYYYGMDVW

SEQ ID NO: 56104 - protein, 25 aa, Homo sapiens
CAKALKTYYYDSSGYYRAQEYFQHW

SEQ ID NO: 56105 - protein, 22 aa, Homo sapiens
CAKQVGLYCSGGSCYRGGFDYW

SEQ ID NO: 56106 - protein, 14 aa, Homo sapiens
CARHGRSGDAPDYW

SEQ ID NO: 56107 - protein, 29 aa, Homo sapiens
CAKDWGYYDILTGYLARVDYYYYYGMDVW

SEQ ID NO: 56108 - protein, 22 aa, Homo sapiens
CARDGVLRYFDSSRTDWYFDLW

SEQ ID NO: 56109 - protein, 20 aa, Homo sapiens
CARLGGGSSWYTHNDAFDIW

SEQ ID NO: 56110 - protein, 21 aa, Homo sapiens
CARFIAVAGRYYYYYYGMDVW

SEQ ID NO: 56111 - protein, 15 aa, Homo sapiens
CAHRGYGGYYGMDVW

SEQ ID NO: 56112 - protein, 21 aa, Homo sapiens
CARDLMWRYFDWLLSTGFDYW

SEQ ID NO: 56113 - protein, 24 aa, Homo sapiens
CARHGIRQKYCGGDCYYYYGMDVW

SEQ ID NO: 56114 - protein, 17 aa, Homo sapiens
CAKCQEQWLVDATFDYW

SEQ ID NO: 56115 - protein, 17 aa, Homo sapiens
CAKDLTPTVTTWWFDPW

SEQ ID NO: 56116 - protein, 24 aa, Homo sapiens
CAKEGRGNWNDVFHNLHLGYFDYW

SEQ ID NO: 56117 - protein, 21 aa, Homo sapiens
CAREGDILTGYYTRGGWFDPW

SEQ ID NO: 56118 - protein, 19 aa, Homo sapiens
CARDSRSWMSSVGGTFAYW

SEQ ID NO: 56119 - protein, 19 aa, Homo sapiens
CARRALDGSEDYGDWFDPW

SEQ ID NO: 56120 - protein, 17 aa, Homo sapiens
CAKARITMIVVVDFDYW

SEQ ID NO: 56121 - protein, 18 aa, Homo sapiens
CARGQWLANLLPYYFDYW

SEQ ID NO: 56122 - protein, 40 aa, Homo sapiens
CAKVRYYYGSGSYYPNLFYDYVWGSYRSFPMEVLPLFDYW

SEQ ID NO: 56123 - protein, 15 aa, Homo sapiens
CARGIWLRGYVLDYW

SEQ ID NO: 56124 - protein, 20 aa, Homo sapiens
CARSPPFMVRGAYYYGMDVW

SEQ ID NO: 56125 - protein, 17 aa, Homo sapiens
CKSDPMWVVDGSSRDYW

SEQ ID NO: 56126 - protein, 18 aa, Homo sapiens
CVRENMVGPYHVRALDYW

SEQ ID NO: 56127 - protein, 15 aa, Homo sapiens
CASGGHYGEVPFDYW

SEQ ID NO: 56128 - protein, 18 aa, Homo sapiens
CARDRDSNDYALRGFDPW

SEQ ID NO: 56129 - protein, 22 aa, Homo sapiens
CARDQQPNWGSYYYYYYGMDVW

SEQ ID NO: 56130 - protein, 18 aa, Homo sapiens
CSGELWFGELSRTDYDYW

SEQ ID NO: 56131 - protein, 20 aa, Homo sapiens
CTTVGIVVVVAATPLPFDYW

SEQ ID NO: 56132 - protein, 23 aa, Homo sapiens
CAKDAWFGELSNGRYYYYGMDVW

SEQ ID NO: 56133 - protein, 20 aa, Homo sapiens
CARSLWAGGAGHYYYGMDVW

SEQ ID NO: 56134 - protein, 20 aa, Homo sapiens
CARHLLGYCSSTSCSQADYW

SEQ ID NO: 56135 - protein, 22 aa, Homo sapiens
CARVNPGYCSGGSCYRRYFQHW

SEQ ID NO: 56136 - protein, 16 aa, Homo sapiens
CARGGYYDSSGYGYYW

SEQ ID NO: 56137 - protein, 19 aa, Homo sapiens
CARTSYDILTGVMYTFDYW

SEQ ID NO: 56138 - protein, 17 aa, Homo sapiens
CMREARGGLPKALIDYW

SEQ ID NO: 56139 - protein, 31 aa, Homo sapiens
CAKDQLVGATRNSPRWELVWSLYYYYGMDVW

SEQ ID NO: 56140 - protein, 28 aa, Homo sapiens
CARGLLSWGYYDILTGYYGTGPDYFDYW

SEQ ID NO: 56141 - protein, 15 aa, Homo sapiens
CARDEWLAEGYFDYW

SEQ ID NO: 56142 - protein, 25 aa, Homo sapiens
CARRSTEAAYSSGWYKFYYYGMDVW

SEQ ID NO: 56143 - protein, 24 aa, Homo sapiens
CVRDELRRYQFCSSPACLYFFNYW

SEQ ID NO: 56144 - protein, 19 aa, Homo sapiens
CARDGDILTGRPYYYFDYW

SEQ ID NO: 56145 - protein, 17 aa, Homo sapiens
CAKDMEVVAMSGGPDYW

SEQ ID NO: 56146 - protein, 22 aa, Homo sapiens
CARMLFEGTVTTFYYYYGMDVW

SEQ ID NO: 56147 - protein, 22 aa, Homo sapiens
CARVSFHETYYYDSSGYYSDYW

SEQ ID NO: 56148 - protein, 21 aa, Homo sapiens
CARNYYYGSGRPYYYSGMDVW

SEQ ID NO: 56149 - protein, 21 aa, Homo sapiens
CARRPLWFGELGVYYYGMDVW

SEQ ID NO: 56150 - protein, 15 aa, Homo sapiens
CARGYERLEGWFDPW

SEQ ID NO: 56151 - protein, 19 aa, Homo sapiens
CARKSPPAAGPLDDAFDIW

SEQ ID NO: 56152 - protein, 20 aa, Homo sapiens
CARKTYYYDSSGSNIPFDIW

SEQ ID NO: 56153 - protein, 16 aa, Homo sapiens
CARARGIAVAGTFDNW

SEQ ID NO: 56154 - protein, 24 aa, Homo sapiens
CARDGGVGATTKRDYYYYYGMDVW

SEQ ID NO: 56155 - protein, 18 aa, Homo sapiens
CAITYDSSGSTLEAFDIW

SEQ ID NO: 56156 - protein, 24 aa, Homo sapiens
CARELSGIQLWPQPTYYYYGMDVW

SEQ ID NO: 56157 - protein, 27 aa, Homo sapiens
CARDVTQRGYSGYLRSKYYYYYGMDVW

SEQ ID NO: 56158 - protein, 14 aa, Homo sapiens
CARSWSLTVTYDYW

SEQ ID NO: 56159 - protein, 21 aa, Homo sapiens
CAKDGLGVVVVAAHFTPFDYW

SEQ ID NO: 56160 - protein, 17 aa, Homo sapiens
CAKDRVGSYYAVDFDYW

SEQ ID NO: 56161 - protein, 21 aa, Homo sapiens
CAKQVGAYCGGDCPMYYFDYW

SEQ ID NO: 56162 - protein, 21 aa, Homo sapiens
CATGAYLLQEGIAVAGMLDYW

SEQ ID NO: 56163 - protein, 16 aa, Homo sapiens
CSSYAGSNNFEGLWVF

SEQ ID NO: 56164 - protein, 18 aa, Homo sapiens
CTVASYSSGWFEHYFQNW

SEQ ID NO: 56165 - protein, 21 aa, Homo sapiens
CARAGGLIGWELLRGNWFDPW

SEQ ID NO: 56166 - protein, 25 aa, Homo sapiens
CARGDGPVPPALLQRVVRGYYFDHW

SEQ ID NO: 56167 - protein, 15 aa, Homo sapiens
CARVLRYSSSWVDYW

SEQ ID NO: 56168 - protein, 28 aa, Homo sapiens
CARGPKLGYCSGGSCYSSYYYYYGMDVW

SEQ ID NO: 56169 - protein, 25 aa, Homo sapiens
CAREVDCIKSLWFGELLSQCAFDIW

SEQ ID NO: 56170 - protein, 15 aa, Homo sapiens
CARTWGAVVSPFDYW

SEQ ID NO: 56171 - protein, 15 aa, Homo sapiens
CAHRKGSWYYRFDYW

SEQ ID NO: 56172 - protein, 20 aa, Homo sapiens
CARGRYSSSWYGYAEYFQHW

SEQ ID NO: 56173 - protein, 19 aa, Homo sapiens
CARTSTWDYDSSGDAFDIW

SEQ ID NO: 56174 - protein, 17 aa, Homo sapiens
CTKIGGGESTGWYFDQW

SEQ ID NO: 56175 - protein, 19 aa, Homo sapiens
CASPGFYYYDSSGYYDEYW

SEQ ID NO: 56176 - protein, 19 aa, Homo sapiens
CARYYSSSWYETGWYFDLW

SEQ ID NO: 56177 - protein, 14 aa, Homo sapiens
CARTYEPSKAFDIW

SEQ ID NO: 56178 - protein, 17 aa, Homo sapiens
CAHSSGNWNDGGRFDPW

SEQ ID NO: 56179 - protein, 14 aa, Homo sapiens
CAKEWQTYGTIDYW

SEQ ID NO: 56180 - protein, 20 aa, Homo sapiens
CAKGRLYDSSGYYPDAFDIW

SEQ ID NO: 56181 - protein, 28 aa, Homo sapiens
CARDFVEGPIWFGELDSPVYYYYGMDVW

SEQ ID NO: 56182 - protein, 18 aa, Homo sapiens
CAREIAVAGTSSWWFDPW

SEQ ID NO: 56183 - protein, 25 aa, Homo sapiens
CATRSGHCSGGSCFPHYYYYGMDVW

SEQ ID NO: 56184 - protein, 17 aa, Homo sapiens
CARGGIQLWLLIGFWYW

SEQ ID NO: 56185 - protein, 27 aa, Homo sapiens
CARSPLSYYYDSSGRGMNYYYYGMDVW

SEQ ID NO: 56186 - protein, 18 aa, Homo sapiens
CAKDGGWYGDYAHYFDYW

SEQ ID NO: 56187 - protein, 22 aa, Homo sapiens
CARDLYSGYTSGDYYYYGMDVW

SEQ ID NO: 56188 - protein, 16 aa, Homo sapiens
CAREVLGPDSSGEDYW

SEQ ID NO: 56189 - protein, 16 aa, Homo sapiens
CARVSPSPDMGMNDYW

SEQ ID NO: 56190 - protein, 21 aa, Homo sapiens
CARQGVVTAIYSDQKQHFDYW

SEQ ID NO: 56191 - protein, 20 aa, Homo sapiens
CAKAGGIQLWFYETRHFDYW

SEQ ID NO: 56192 - protein, 20 aa, Homo sapiens
CARRPYYYGSGSLSHAFDIW

SEQ ID NO: 56193 - protein, 17 aa, Homo sapiens
CAKDVNGDYVPGWFDPW

SEQ ID NO: 56194 - protein, 17 aa, Homo sapiens
CAAPRRELLSAGDFDYW

SEQ ID NO: 56195 - protein, 22 aa, Homo sapiens
CARGHSRLGQWLVLPFWWFDPW

SEQ ID NO: 56196 - protein, 22 aa, Homo sapiens
CARWGVVARQSLYYYYYGMDVW

SEQ ID NO: 56197 - protein, 26 aa, Homo sapiens
CARFPTYYYDSSGWGWTYYYYGMDVW

SEQ ID NO: 56198 - protein, 13 aa, Homo sapiens
CARDLVEFGLDYW

SEQ ID NO: 56199 - protein, 26 aa, Homo sapiens
CARGTTVTTLSPNWSRRYYYYGMDVW

SEQ ID NO: 56200 - protein, 14 aa, Homo sapiens
CAHSRDFADSFDIW

SEQ ID NO: 56201 - protein, 21 aa, Homo sapiens
CATLTRGLLWFGELLVYFQHW

SEQ ID NO: 56202 - protein, 16 aa, Homo sapiens
CARDWGFAGGDHFDFW

SEQ ID NO: 56203 - protein, 24 aa, Homo sapiens
CATIQITMVRGVILNYYYYGMDVW

SEQ ID NO: 56204 - protein, 17 aa, Homo sapiens
CSKDAGLIAVDDIFDAW

SEQ ID NO: 56205 - protein, 17 aa, Homo sapiens
CARDLGWNLWLLAPDYW

SEQ ID NO: 56206 - protein, 21 aa, Homo sapiens
CARGIYYYDSSGYGVNWFDPW

SEQ ID NO: 56207 - protein, 21 aa, Homo sapiens
CAKDYLDSGYDSYYYYGMDVW

SEQ ID NO: 56208 - protein, 19 aa, Homo sapiens
CARDAFAHGYSSGWYDDYW

SEQ ID NO: 56209 - protein, 22 aa, Homo sapiens
CARDPYYYDGSGYFGSEAFDIW

SEQ ID NO: 56210 - protein, 21 aa, Homo sapiens
CARDLSVYCSGGSCYSTADYW

SEQ ID NO: 56211 - protein, 21 aa, Homo sapiens
CATTTGTTDKRFFYNYGFDVW

SEQ ID NO: 56212 - protein, 14 aa, Homo sapiens
CARHRGYGHGYDYW

SEQ ID NO: 56213 - protein, 18 aa, Homo sapiens
CATHAGWELLLGGYFDLW

SEQ ID NO: 56214 - protein, 29 aa, Homo sapiens
CAKDLQRTTRYSGSGNYYKFRLVSGFDYW

SEQ ID NO: 56215 - protein, 15 aa, Homo sapiens
CAKVGNDGSGSYDYW

SEQ ID NO: 56216 - protein, 19 aa, Homo sapiens
CARDSPLRYGGNGLGFDYW

SEQ ID NO: 56217 - protein, 25 aa, Homo sapiens
CARTPGYYDILTGYYLVETNWFDPW

SEQ ID NO: 56218 - protein, 15 aa, Homo sapiens
CVADVPGGSYPYDYW

SEQ ID NO: 56219 - protein, 19 aa, Homo sapiens
CARVSRDYGSNSEPFFDYW

SEQ ID NO: 56220 - protein, 25 aa, Homo sapiens
CARDLGYDILTGYPSHYYYYGMDVW

SEQ ID NO: 56221 - protein, 12 aa, Homo sapiens
CVAWIQTHFDDW

SEQ ID NO: 56222 - protein, 17 aa, Homo sapiens
CAKGEDEELGGWYFDLW

SEQ ID NO: 56223 - protein, 28 aa, Homo sapiens
CAKGQSTYYYDSSGYPTDPYYYYGMDVW

SEQ ID NO: 56224 - protein, 17 aa, Homo sapiens
CARGVGDYMEGNWFDPW

SEQ ID NO: 56225 - protein, 21 aa, Homo sapiens
CARKWCSRTVCFDRSSYFDSW

SEQ ID NO: 56226 - protein, 18 aa, Homo sapiens
CASWASPLRSGWYGFDYW

SEQ ID NO: 56227 - protein, 17 aa, Homo sapiens
CAKDVQYQLLPDAFDIW

SEQ ID NO: 56228 - protein, 24 aa, Homo sapiens
CARDGAYYDILTGYYRGNNYFDYW

SEQ ID NO: 56229 - protein, 18 aa, Homo sapiens
CAHRPGIAVAGGLRFDYW

SEQ ID NO: 56230 - protein, 27 aa, Homo sapiens
CARDYLDTYYDILTGYYNPRGNWFDPW

SEQ ID NO: 56231 - protein, 15 aa, Homo sapiens
CARRLFEVGASNDYW

SEQ ID NO: 56232 - protein, 20 aa, Homo sapiens
CAREADFLGSKSGSYYFDLW

SEQ ID NO: 56233 - protein, 20 aa, Homo sapiens
CARVRPIYCGGGSCSYFDFW

SEQ ID NO: 56234 - protein, 19 aa, Homo sapiens
CARLARGGSDWYRRYFDFW

SEQ ID NO: 56235 - protein, 16 aa, Homo sapiens
CAKDLLRFGGYAFDIW

SEQ ID NO: 56236 - protein, 21 aa, Homo sapiens
CARAGYSKRTASYYYYGMDVW

SEQ ID NO: 56237 - protein, 18 aa, Homo sapiens
CVIRYCSSTSCPNWFDPW

SEQ ID NO: 56238 - protein, 18 aa, Homo sapiens
CARGEHHGSGKWWWFDPW

SEQ ID NO: 56239 - protein, 19 aa, Homo sapiens
CARVGLRYFDWLWSWIDYW

SEQ ID NO: 56240 - protein, 20 aa, Homo sapiens
CARDLTMVRGEYYYYGMDVW

SEQ ID NO: 56241 - protein, 15 aa, Homo sapiens
CATHSSGWDVPFDYW

SEQ ID NO: 56242 - protein, 19 aa, Homo sapiens
CARQGSDSDGFYNYAFDLW

SEQ ID NO: 56243 - protein, 22 aa, Homo sapiens
CARDERLGDSSGYYKFGAFDIW

SEQ ID NO: 56244 - protein, 17 aa, Homo sapiens
CVKDINYYDSEGPVDYW

SEQ ID NO: 56245 - protein, 18 aa, Homo sapiens
CVREQDIASAADDAFDFW

SEQ ID NO: 56246 - protein, 13 aa, Homo sapiens
CASLYGSGSFVYW

SEQ ID NO: 56247 - protein, 23 aa, Homo sapiens
CATGSAVAGTPTNYYYYYGMDVW

SEQ ID NO: 56248 - protein, 25 aa, Homo sapiens
CARGGDGYNHQSMFHYYYYYGMDVW

SEQ ID NO: 56249 - protein, 12 aa, Homo sapiens
CVREEVRAFEIW

SEQ ID NO: 56250 - protein, 24 aa, Homo sapiens
CARDRAPYYYGSGSYYEGYGMDVW

SEQ ID NO: 56251 - protein, 19 aa, Homo sapiens
CARVNTDGLYGGNGPFDFW

SEQ ID NO: 56252 - protein, 15 aa, Homo sapiens
CARTDYGSGTTSDYW

SEQ ID NO: 56253 - protein, 19 aa, Homo sapiens
CASWDCSGGSCYSGYFDYW

SEQ ID NO: 56254 - protein, 29 aa, Homo sapiens
CARDVVVVPAASPEPSSPIYYYYYGMDVW

SEQ ID NO: 56255 - protein, 20 aa, Homo sapiens
CARVNGELGVCSSTSCYDYW

SEQ ID NO: 56256 - protein, 15 aa, Homo sapiens
CARGDGSYQLPFDYW

SEQ ID NO: 56257 - protein, 17 aa, Homo sapiens
CARTPIGSGSYLAFDYW

SEQ ID NO: 56258 - protein, 20 aa, Homo sapiens
CARGVPAAVSWGTYYAMDVW

SEQ ID NO: 56259 - protein, 20 aa, Homo sapiens
CARDIVLVALAGQRMAFDIW

SEQ ID NO: 56260 - protein, 18 aa, Homo sapiens
CARALFRYYGSGSSFDYW

SEQ ID NO: 56261 - protein, 18 aa, Homo sapiens
CAKVPSRNVLLWFGFDYW

SEQ ID NO: 56262 - protein, 27 aa, Homo sapiens
CAKARLRYYDILTGYRVGYYYYGMDVW

SEQ ID NO: 56263 - protein, 16 aa, Homo sapiens
CARLHLSGSYGIFDYW

SEQ ID NO: 56264 - protein, 17 aa, Homo sapiens
CARDVYHLPAVSSFDIW

SEQ ID NO: 56265 - protein, 27 aa, Homo sapiens
CARDLRYFDWSIIRDVDINTPGAFDIW

SEQ ID NO: 56266 - protein, 19 aa, Homo sapiens
CARDFWPRVLTGYHYFDYW

SEQ ID NO: 56267 - protein, 17 aa, Homo sapiens
CAKLDGERWLQSTGDYW

SEQ ID NO: 56268 - protein, 18 aa, Homo sapiens
CAREADSSTSCYLCLDYW

SEQ ID NO: 56269 - protein, 22 aa, Homo sapiens
CAKNGREQLLWFGEFVYYFDYW

SEQ ID NO: 56270 - protein, 20 aa, Homo sapiens
CARYCSGGSCSYKYYALDVW

SEQ ID NO: 56271 - protein, 20 aa, Homo sapiens
CACVYVHDGSGLYSPTPDYW

SEQ ID NO: 56272 - protein, 20 aa, Homo sapiens
CAHIHTGSRWLQSSDYFDYW

SEQ ID NO: 56273 - protein, 19 aa, Homo sapiens
CARRGIAAAGSMGLFSDYW

SEQ ID NO: 56274 - protein, 17 aa, Homo sapiens
CAIGDASSWFSWFFGYW

SEQ ID NO: 56275 - protein, 18 aa, Homo sapiens
CARDPPSFVVVPAGSDYW

SEQ ID NO: 56276 - protein, 17 aa, Homo sapiens
CARFWLGIAAAGGMDYW

SEQ ID NO: 56277 - protein, 16 aa, Homo sapiens
CVRRPYSNNQFIFDSW

SEQ ID NO: 56278 - protein, 21 aa, Homo sapiens
CARDRYYDTGGVQTPEAFDIW

SEQ ID NO: 56279 - protein, 19 aa, Homo sapiens
CAKPGWNFFDGGSCFFDHW

SEQ ID NO: 56280 - protein, 16 aa, Homo sapiens
CAHRLMVVTATHFQHW

SEQ ID NO: 56281 - protein, 19 aa, Homo sapiens
CAKSMNVVIQHERTGFDYW

SEQ ID NO: 56282 - protein, 15 aa, Homo sapiens
CAKGTYGDYALGDYW

SEQ ID NO: 56283 - protein, 14 aa, Homo sapiens
CARPEVNSGGWDYW

SEQ ID NO: 56284 - protein, 16 aa, Homo sapiens
CARGESLGQYYYFDYW

SEQ ID NO: 56285 - protein, 22 aa, Homo sapiens
CAKDGGAWYSLGYYYYYGMDVW

SEQ ID NO: 56286 - protein, 21 aa, Homo sapiens
CARLERLRWTGPPPGNAFDIW

SEQ ID NO: 56287 - protein, 23 aa, Homo sapiens
CARATNNDYYYGSGSYGDAFDIW

SEQ ID NO: 56288 - protein, 21 aa, Homo sapiens
CARERDHYDSSGYNDDGFDIW

SEQ ID NO: 56289 - protein, 13 aa, Homo sapiens
CASSQEGAAGDYW

SEQ ID NO: 56290 - protein, 19 aa, Homo sapiens
CAREVNTDSYYNYYDMDVW

SEQ ID NO: 56291 - protein, 17 aa, Homo sapiens
CAKGLTTRAPVGTFDPW

SEQ ID NO: 56292 - protein, 20 aa, Homo sapiens
CAKDPRGYSYGYPPNWFDPW

SEQ ID NO: 56293 - protein, 15 aa, Homo sapiens
CTRENLRKLYYFDYW

SEQ ID NO: 56294 - protein, 21 aa, Homo sapiens
CARSDLRLGELSSEEKGLDYW

SEQ ID NO: 56295 - protein, 16 aa, Homo sapiens
CARGRNSGWYPPFDYW

SEQ ID NO: 56296 - protein, 26 aa, Homo sapiens
CARDVGYCSGGSCYSGLDYYYGMDVW

SEQ ID NO: 56297 - protein, 17 aa, Homo sapiens
CAKDHGAWLLGDYFDYW

SEQ ID NO: 56298 - protein, 20 aa, Homo sapiens
CAKDIASGSIVGATTYFDYW

SEQ ID NO: 56299 - protein, 18 aa, Homo sapiens
CARGEQVSELSLGLFDYW

SEQ ID NO: 56300 - protein, 18 aa, Homo sapiens
CARERYSSSWYNGWFDPW

SEQ ID NO: 56301 - protein, 17 aa, Homo sapiens
CTTDSYWNDVAYYFDYW

SEQ ID NO: 56302 - protein, 17 aa, Homo sapiens
CAHSSGYSYDWRYFDYW

SEQ ID NO: 56303 - protein, 17 aa, Homo sapiens
CAGGYDFVVGDWYFDLW

SEQ ID NO: 56304 - protein, 15 aa, Homo sapiens
CATAEDSGWKNFDSW

SEQ ID NO: 56305 - protein, 22 aa, Homo sapiens
CAREFRFTGSGWYWSYNWFDPW

SEQ ID NO: 56306 - protein, 19 aa, Homo sapiens
CASDVGYSSGWYTGVFDYW

SEQ ID NO: 56307 - protein, 17 aa, Homo sapiens
CASFAFDYGDSNWFDPW

SEQ ID NO: 56308 - protein, 18 aa, Homo sapiens
CARMAKFGAFKTEAFDVW

SEQ ID NO: 56309 - protein, 23 aa, Homo sapiens
CARGRPWSSWYRSLTAIPEFDYW

SEQ ID NO: 56310 - protein, 17 aa, Homo sapiens
CARGSGSYLRGYYVEYW

SEQ ID NO: 56311 - protein, 18 aa, Homo sapiens
CAKRTLPSGSPGTFFDFW

SEQ ID NO: 56312 - protein, 23 aa, Homo sapiens
CARDNGYSGYDLPTKPRGGFDPW

SEQ ID NO: 56313 - protein, 15 aa, Homo sapiens
CALVGGSGDHAFNIW

SEQ ID NO: 56314 - protein, 16 aa, Homo sapiens
CAKDQWWELLSGFDYW

SEQ ID NO: 56315 - protein, 17 aa, Homo sapiens
CASTSQYGYSYGTFDYW

SEQ ID NO: 56316 - protein, 19 aa, Homo sapiens
CAKMGGPGYSYGYSGGDYW

SEQ ID NO: 56317 - protein, 21 aa, Homo sapiens
CARAESYSSGWYGGHYAFDIW

SEQ ID NO: 56318 - protein, 16 aa, Homo sapiens
CARTGAAADNDLFDYW

SEQ ID NO: 56319 - protein, 19 aa, Homo sapiens
CARILEHYYGSGSLWFDYW

SEQ ID NO: 56320 - protein, 18 aa, Homo sapiens
CAHRPSTWTKATTWFDPW

SEQ ID NO: 56321 - protein, 14 aa, Homo sapiens
CARDEKGSYNFDYW

SEQ ID NO: 56322 - protein, 22 aa, Homo sapiens
CARDDPLSVVVPPFYYYGMDVW

SEQ ID NO: 56323 - protein, 21 aa, Homo sapiens
CARGRGLVLRYFDWLFYFDYW

SEQ ID NO: 56324 - protein, 21 aa, Homo sapiens
CATTTAYCSGGSCYLGWFDPW

SEQ ID NO: 56325 - protein, 20 aa, Homo sapiens
CARGGDIFQAVPATESFDVW

SEQ ID NO: 56326 - protein, 21 aa, Homo sapiens
CAKDRSWYRGYYYYYYGMDVW

SEQ ID NO: 56327 - protein, 21 aa, Homo sapiens
CTTQDYYDILTGYYKDAFDIW

SEQ ID NO: 56328 - protein, 22 aa, Homo sapiens
CARYYPTGYSSGWYVGDYFDYW

SEQ ID NO: 56329 - protein, 19 aa, Homo sapiens
CARDLDCGGDCYREFLDYW

SEQ ID NO: 56330 - protein, 18 aa, Homo sapiens
CANQGDDSGWKGGYFDYW

SEQ ID NO: 56331 - protein, 16 aa, Homo sapiens
CARESGDELPTYFDYW

SEQ ID NO: 56332 - protein, 24 aa, Homo sapiens
CARDQTLHYDILTGYYSDNWFDPW

SEQ ID NO: 56333 - protein, 18 aa, Homo sapiens
CATSDGIWFGELYAFHYW

SEQ ID NO: 56334 - protein, 26 aa, Homo sapiens
CARDPNLRYFDWTLLNYYYYYGMDVW

SEQ ID NO: 56335 - protein, 20 aa, Homo sapiens
CARECCEGVATIGADAFDIW

SEQ ID NO: 56336 - protein, 20 aa, Homo sapiens
CAKDLPEADTYYYGSGPDYW

SEQ ID NO: 56337 - protein, 15 aa, Homo sapiens
CARSFRFGETEVDYW

SEQ ID NO: 56338 - protein, 18 aa, Homo sapiens
CAKDKILNWNDGFYFDYW

SEQ ID NO: 56339 - protein, 21 aa, Homo sapiens
CASLKTPPPYDYYYYYGMDVW

SEQ ID NO: 56340 - protein, 13 aa, Homo sapiens
CSAWDRTLSAWVF

SEQ ID NO: 56341 - protein, 22 aa, Homo sapiens
CARQPPKGQWLVRGSRGYFDYW

SEQ ID NO: 56342 - protein, 19 aa, Homo sapiens
CARAAGYSSGWYPDYFDYW

SEQ ID NO: 56343 - protein, 17 aa, Homo sapiens
CARAAEGDYYGSALDYW

SEQ ID NO: 56344 - protein, 20 aa, Homo sapiens
CARDPTWELPYYYYYGMDVW

SEQ ID NO: 56345 - protein, 13 aa, Homo sapiens
CQSYDSTLSDFLF

SEQ ID NO: 56346 - protein, 21 aa, Homo sapiens
CAKDIYYGDYGTNYYYGMDVW

SEQ ID NO: 56347 - protein, 24 aa, Homo sapiens
CARHRRPVKYSYDVRAYSSPFDFW

SEQ ID NO: 56348 - protein, 21 aa, Homo sapiens
CARADLILTQTGYSSSCLDYW

SEQ ID NO: 56349 - protein, 17 aa, Homo sapiens
CARAYPWKLGMFYFDLW

SEQ ID NO: 56350 - protein, 22 aa, Homo sapiens
CARAHQAFDGYNYLSWWYFDLW

SEQ ID NO: 56351 - protein, 22 aa, Homo sapiens
CARRPSPPLIWSGSYSGWFDPW

SEQ ID NO: 56352 - protein, 19 aa, Homo sapiens
CAKDSGYSSSWYYDAFDIW

SEQ ID NO: 56353 - protein, 16 aa, Homo sapiens
CALTRGGSYRSYFDYW

SEQ ID NO: 56354 - protein, 19 aa, Homo sapiens
CARASGGSSWYDPGWFDLW

SEQ ID NO: 56355 - protein, 19 aa, Homo sapiens
CARAKTTVGGTTFWYFDLW

SEQ ID NO: 56356 - protein, 17 aa, Homo sapiens
CASEVLVPAALGSFDYW

SEQ ID NO: 56357 - protein, 16 aa, Homo sapiens
CARREQWLVDDAFDIW

SEQ ID NO: 56358 - protein, 24 aa, Homo sapiens
CARKIWGTHYSEGSAYQFDAFDIW

SEQ ID NO: 56359 - protein, 24 aa, Homo sapiens
CARVFYYYDSSGYKLRLYWYFDLW

SEQ ID NO: 56360 - protein, 16 aa, Homo sapiens
CAKGTHPSAAGHFDYW

SEQ ID NO: 56361 - protein, 15 aa, Homo sapiens
CARDGDKYGQDLDYW

SEQ ID NO: 56362 - protein, 23 aa, Homo sapiens
CARDRPYHDGYLVFVYYYGMDVW

SEQ ID NO: 56363 - protein, 22 aa, Homo sapiens
CARSRCRGVWFGELPYCAFDYW

SEQ ID NO: 56364 - protein, 17 aa, Homo sapiens
CARDQGSSWEQGPFDPW

SEQ ID NO: 56365 - protein, 15 aa, Homo sapiens
CVRVLRGVRYYFDYW

SEQ ID NO: 56366 - protein, 20 aa, Homo sapiens
CARAWIDYDSSGYSSPFDYW

SEQ ID NO: 56367 - protein, 24 aa, Homo sapiens
CARGGGIAVAGMWNWHYYYGMDVW

SEQ ID NO: 56368 - protein, 21 aa, Homo sapiens
CAREPDYYDSSGYYYVGMDVW

SEQ ID NO: 56369 - protein, 25 aa, Homo sapiens
CARDLLLQIAAAEDDYYYYYGMDVW

SEQ ID NO: 56370 - protein, 11 aa, Homo sapiens
CAQDGGEVDYW

SEQ ID NO: 56371 - protein, 21 aa, Homo sapiens
CATDPNLYYYDSSGYYPLDYW

SEQ ID NO: 56372 - protein, 15 aa, Homo sapiens
CQQYNNWPPPPMYTF

SEQ ID NO: 56373 - protein, 22 aa, Homo sapiens
CATAGIVVVPAAMRYYYGMDVW

SEQ ID NO: 56374 - protein, 22 aa, Homo sapiens
CARDLPYYGSGSYYNGYGMDVW

SEQ ID NO: 56375 - protein, 24 aa, Homo sapiens
CARDFKHLAVAGADNYYYYGMDVW

SEQ ID NO: 56376 - protein, 17 aa, Homo sapiens
CARDYYGAATQGYFDYW

SEQ ID NO: 56377 - protein, 18 aa, Homo sapiens
CARETFTTVTWYNWFDPW

SEQ ID NO: 56378 - protein, 28 aa, Homo sapiens
CAKDVILGPQKVLWFGELYPRPNWFDPW

SEQ ID NO: 56379 - protein, 20 aa, Homo sapiens
CWVGYCSGGSCYPRWYFDYW

SEQ ID NO: 56380 - protein, 22 aa, Homo sapiens
CARTYLYYYDSSGYGDDAFDIW

SEQ ID NO: 56381 - protein, 22 aa, Homo sapiens
CARHGSIAVAGISLGEGYFDLW

SEQ ID NO: 56382 - protein, 18 aa, Homo sapiens
CAASYGDYGFYYYGMDVW

SEQ ID NO: 56383 - protein, 20 aa, Homo sapiens
CAKIKNGGWFGELLSYFDYW

SEQ ID NO: 56384 - protein, 15 aa, Homo sapiens
CARDVASGSPNFDTW

SEQ ID NO: 56385 - protein, 12 aa, Homo sapiens
CQQYNIVSGDSF

SEQ ID NO: 56386 - protein, 19 aa, Homo sapiens
CAKDQARNSYGTRYYFDYW

SEQ ID NO: 56387 - protein, 19 aa, Homo sapiens
CARDKVAPAATPHLPLDYW

SEQ ID NO: 56388 - protein, 15 aa, Homo sapiens
CARDTAIVVPAMDVW

SEQ ID NO: 56389 - protein, 17 aa, Homo sapiens
CAKALLGYSGSYSFDYW

SEQ ID NO: 56390 - protein, 22 aa, Homo sapiens
CARDPAYHDILTGYTARAFDIW

SEQ ID NO: 56391 - protein, 16 aa, Homo sapiens
CAKEHLYGSGPLVDYW

SEQ ID NO: 56392 - protein, 14 aa, Homo sapiens
CTSSSSSTWNFDYW

SEQ ID NO: 56393 - protein, 25 aa, Homo sapiens
CARLVGTYYYDSSGYWSRLGWFDPW

SEQ ID NO: 56394 - protein, 20 aa, Homo sapiens
CARLLLLMGSSITTPAFDIW

SEQ ID NO: 56395 - protein, 16 aa, Homo sapiens
CARSTHYYDSGRFDPW

SEQ ID NO: 56396 - protein, 18 aa, Homo sapiens
CARDASLVGGYDSPFDYW

SEQ ID NO: 56397 - protein, 19 aa, Homo sapiens
CARHRDSGNFYILDPLDIW

SEQ ID NO: 56398 - protein, 21 aa, Homo sapiens
CARDKSWDSGYEFYYYGMDVW

SEQ ID NO: 56399 - protein, 19 aa, Homo sapiens
CARGGLRYFDWLVGGFDPW

SEQ ID NO: 56400 - protein, 20 aa, Homo sapiens
CARQEGLRYFDWLLHPIDYW

SEQ ID NO: 56401 - protein, 20 aa, Homo sapiens
CARERSFSGWYYYYYGMDVW

SEQ ID NO: 56402 - protein, 19 aa, Homo sapiens
CARVRGYSYGYSPYWFDPW

SEQ ID NO: 56403 - protein, 17 aa, Homo sapiens
CARASLDSSGYYPFDYW

SEQ ID NO: 56404 - protein, 22 aa, Homo sapiens
CARERWYYYGSGSYLWGYFDYW

SEQ ID NO: 56405 - protein, 20 aa, Homo sapiens
CAKDQQLRPGSYYYYGMDVW

SEQ ID NO: 56406 - protein, 18 aa, Homo sapiens
CATDPCGGGSCYGAHDYW

SEQ ID NO: 56407 - protein, 26 aa, Homo sapiens
CARGEQYYGSGSYYGRWYYYYGMDVW

SEQ ID NO: 56408 - protein, 20 aa, Homo sapiens
CARPYFDADSNYYPYAMDVW

SEQ ID NO: 56409 - protein, 24 aa, Homo sapiens
CARGVRSDFEYYDILTGYPNFDYW

SEQ ID NO: 56410 - protein, 14 aa, Homo sapiens
CVKAGGGSSPFDYW

SEQ ID NO: 56411 - protein, 16 aa, Homo sapiens
CSGGVPPHYYYGMDVW

SEQ ID NO: 56412 - protein, 21 aa, Homo sapiens
CAKELWFGEASPYYYYGMDVW

SEQ ID NO: 56413 - protein, 17 aa, Homo sapiens
CARDLLAPSSGWSLDYW

SEQ ID NO: 56414 - protein, 21 aa, Homo sapiens
CAKDFSPVGATPYHYYGMDVW

SEQ ID NO: 56415 - protein, 20 aa, Homo sapiens
CARGPFFSAFYGSGSYGDYW

SEQ ID NO: 56416 - protein, 21 aa, Homo sapiens
CARPEWSVAGSGYYYYGMDVW

SEQ ID NO: 56417 - protein, 18 aa, Homo sapiens
CARDRDSSGYPAYYFDYW

SEQ ID NO: 56418 - protein, 16 aa, Homo sapiens
CTREAYSDSSGYWDYW

SEQ ID NO: 56419 - protein, 28 aa, Homo sapiens
CASHGTDPWIQLWKPWIPEYNNWYFDLW

SEQ ID NO: 56420 - protein, 18 aa, Homo sapiens
CAREPDSSGWYDNWFDPW

SEQ ID NO: 56421 - protein, 22 aa, Homo sapiens
CARNSLVTADDDYYYYYGMDVW

SEQ ID NO: 56422 - protein, 19 aa, Homo sapiens
CTKTAQDGSGSFYDPFDSW

SEQ ID NO: 56423 - protein, 15 aa, Homo sapiens
CARTMDTSLPYFDYW

SEQ ID NO: 56424 - protein, 16 aa, Homo sapiens
CARGSSSWYFSPFDYW

SEQ ID NO: 56425 - protein, 14 aa, Homo sapiens
CGKLHTSGNAFDIW

SEQ ID NO: 56426 - protein, 22 aa, Homo sapiens
CAKDLWSHVDYTYYYYYGMDVW

SEQ ID NO: 56427 - protein, 25 aa, Homo sapiens
CAFLPRGESSSWYSGYYYYYGMDVW

SEQ ID NO: 56428 - protein, 16 aa, Homo sapiens
CARRYSGSSPLPPDYW

SEQ ID NO: 56429 - protein, 25 aa, Homo sapiens
CARWGGTGIAVAGTFNYYYYGMDVW

SEQ ID NO: 56430 - protein, 18 aa, Homo sapiens
CAKIRRAENGAWSHFDHW

SEQ ID NO: 56431 - protein, 20 aa, Homo sapiens
CARGGYDIFTGYYKRPFDYW

SEQ ID NO: 56432 - protein, 18 aa, Homo sapiens
CARQIGREYGDYPYFDYW

SEQ ID NO: 56433 - protein, 24 aa, Homo sapiens
CARGGAMVRGVIIHAHYYYGMDVW

SEQ ID NO: 56434 - protein, 21 aa, Homo sapiens
CARDLAVTVSPAYYYYGMDVW

SEQ ID NO: 56435 - protein, 19 aa, Homo sapiens
CAREKARITMIVADAFDIW

SEQ ID NO: 56436 - protein, 19 aa, Homo sapiens
CAKDMEGSGWYGGGDFDYW

SEQ ID NO: 56437 - protein, 15 aa, Homo sapiens
CARTSARKLLGFDYW

SEQ ID NO: 56438 - protein, 20 aa, Homo sapiens
CATEGATRQLPYYYYGMDVW

SEQ ID NO: 56439 - protein, 22 aa, Homo sapiens
CARTTYYYDSSGYPAEYYFDYW

SEQ ID NO: 56440 - protein, 18 aa, Homo sapiens
CAREGSSPPYYYYGMDVW

SEQ ID NO: 56441 - protein, 12 aa, Homo sapiens
CASQSVEAFDIW

SEQ ID NO: 56442 - protein, 21 aa, Homo sapiens
CAKNQYYYGSGARFQYYFDYW

SEQ ID NO: 56443 - protein, 16 aa, Homo sapiens
CARRGNNYGYVFFDFW

SEQ ID NO: 56444 - protein, 23 aa, Homo sapiens
CARDGAEAYDMGTGYYPSYFDSW

SEQ ID NO: 56445 - protein, 23 aa, Homo sapiens
CARESVESIVVVVAAIMSWFDPW

SEQ ID NO: 56446 - protein, 13 aa, Homo sapiens
CAGGDAYRQVDYW

SEQ ID NO: 56447 - protein, 24 aa, Homo sapiens
CARVFPHSRYSSGWYNYYYGMDVW

SEQ ID NO: 56448 - protein, 21 aa, Homo sapiens
CAKLNYYDSSWYDNDDAFDIW

SEQ ID NO: 56449 - protein, 18 aa, Homo sapiens
CWGELRDRYYYYYGMDVW

SEQ ID NO: 56450 - protein, 20 aa, Homo sapiens
CARVTRNPDFSWSTPLFDTW

SEQ ID NO: 56451 - protein, 21 aa, Homo sapiens
CAKVLPSYSSGWYVGEGIDYW

SEQ ID NO: 56452 - protein, 20 aa, Homo sapiens
CATGPGYSGYDPSINWFDPW

SEQ ID NO: 56453 - protein, 21 aa, Homo sapiens
CARALLWFGEDPLLADAFDIW

SEQ ID NO: 56454 - protein, 14 aa, Homo sapiens
CAKVFDWRFQFDSW

SEQ ID NO: 56455 - protein, 17 aa, Homo sapiens
CAKRGNDYGGKGGFDYW

SEQ ID NO: 56456 - protein, 20 aa, Homo sapiens
CARHTRPGWLQSSLGAFDIW

SEQ ID NO: 56457 - protein, 19 aa, Homo sapiens
CATRGRCSGGSCNLPADYW

SEQ ID NO: 56458 - protein, 16 aa, Homo sapiens
CAKREFGSKRGGFDYW

SEQ ID NO: 56459 - protein, 15 aa, Homo sapiens
CARDRDSTMIVLDYW

SEQ ID NO: 56460 - protein, 15 aa, Homo sapiens
CARIGYSSGWGFDPW

SEQ ID NO: 56461 - protein, 26 aa, Homo sapiens
CASDHGWYCSGGSCYVTEYYYGMDVW

SEQ ID NO: 56462 - protein, 26 aa, Homo sapiens
CARERVPGFISDSSGYHSYYYGMDVW

SEQ ID NO: 56463 - protein, 26 aa, Homo sapiens
CAKFSAEEIVVVITNTYYYYYGMDVW

SEQ ID NO: 56464 - protein, 18 aa, Homo sapiens
CAKHGGGIQLWSTHFDYW

SEQ ID NO: 56465 - protein, 15 aa, Homo sapiens
CAKGLYDTSGYYDYW

SEQ ID NO: 56466 - protein, 29 aa, Homo sapiens
CARFDPDYGDYVSDRRSVGPYWYYGMDVW

SEQ ID NO: 56467 - protein, 18 aa, Homo sapiens
CAKAKGILWFGELLIDYW

SEQ ID NO: 56468 - protein, 14 aa, Homo sapiens
CARLRTIVGAFDQW

SEQ ID NO: 56469 - protein, 20 aa, Homo sapiens
CARDGASIVVNYYYYGMDVW

SEQ ID NO: 56470 - protein, 18 aa, Homo sapiens
CTTESYVWGSYRPPFDYW

SEQ ID NO: 56471 - protein, 18 aa, Homo sapiens
CAKDTSWYYYDSSGYDYW

SEQ ID NO: 56472 - protein, 26 aa, Homo sapiens
CAREDRAYYYDSSGYYYGPSDAFDIW

SEQ ID NO: 56473 - protein, 24 aa, Homo sapiens
CASPAVRRDGYNYLDYYYYGMDVW

SEQ ID NO: 56474 - protein, 24 aa, Homo sapiens
CARDKGPDYWITMVRGGGYLPDYW

SEQ ID NO: 56475 - protein, 22 aa, Homo sapiens
CARDIVAVAGKSPGYYYGMDVW

SEQ ID NO: 56476 - protein, 23 aa, Homo sapiens
CARHQGGYDILTGYYIGGDFDPW

SEQ ID NO: 56477 - protein, 21 aa, Homo sapiens
CARSIGERDSSGYFAAWCDYW

SEQ ID NO: 56478 - protein, 24 aa, Homo sapiens
CARTYMTTVTTSGRSRYYYGMDVW

SEQ ID NO: 56479 - protein, 18 aa, Homo sapiens
CAREGGNDTMSNWYFDLW

SEQ ID NO: 56480 - protein, 17 aa, Homo sapiens
CAHLYYYGSGMGAFDIW

SEQ ID NO: 56481 - protein, 19 aa, Homo sapiens
CAKDDLWDYYDSSGSFDYW

SEQ ID NO: 56482 - protein, 15 aa, Homo sapiens
CTPFTDYYYYGMDVW

SEQ ID NO: 56483 - protein, 20 aa, Homo sapiens
CARGVYHGGKNYYYYGMDVW

SEQ ID NO: 56484 - protein, 23 aa, Homo sapiens
CARDFGVYSSSWGSTPHNWFDPW

SEQ ID NO: 56485 - protein, 20 aa, Homo sapiens
CARGYGSGSYHEGNNWFDPW

SEQ ID NO: 56486 - protein, 23 aa, Homo sapiens
CARSGWKTTDNYQHYYYYGMDVW

SEQ ID NO: 56487 - protein, 18 aa, Homo sapiens
CARIASRGRQELAWFDPW

SEQ ID NO: 56488 - protein, 15 aa, Homo sapiens
CAKDWDSGWSRPDYW

SEQ ID NO: 56489 - protein, 23 aa, Homo sapiens
CASPKPAMVRTLPAYYYYGMDVW

SEQ ID NO: 56490 - protein, 21 aa, Homo sapiens
CARVSAAKHIVVVTASHFDYW

SEQ ID NO: 56491 - protein, 17 aa, Homo sapiens
CATPKETTVTTATFDYW

SEQ ID NO: 56492 - protein, 21 aa, Homo sapiens
CARYEIARGIFSSTWYVLDYW

SEQ ID NO: 56493 - protein, 16 aa, Homo sapiens
CARYRAVAGWSYFDYW

SEQ ID NO: 56494 - protein, 24 aa, Homo sapiens
CARVIPDYGSGSQGNYYYYGMDVW

SEQ ID NO: 56495 - protein, 21 aa, Homo sapiens
CARTHYYDSSGYYFGYAFDIW

SEQ ID NO: 56496 - protein, 17 aa, Homo sapiens
CAHKQITFGGVPSFHYW

SEQ ID NO: 56497 - protein, 18 aa, Homo sapiens
CTRRTFSSDSNGYYFDYW

SEQ ID NO: 56498 - protein, 20 aa, Homo sapiens
CARIGYGSGSLFGFGIIDYW

SEQ ID NO: 56499 - protein, 22 aa, Homo sapiens
CASAGPGYSSSWYSPYNWFDPW

SEQ ID NO: 56500 - protein, 13 aa, Homo sapiens
CAKDGGYYDFDHW

SEQ ID NO: 56501 - protein, 17 aa, Homo sapiens
CTRDWREWLPFDYFDYW

SEQ ID NO: 56502 - protein, 18 aa, Homo sapiens
CITGTTGSHYYYYGMDVW

SEQ ID NO: 56503 - protein, 21 aa, Homo sapiens
CAREVVATIEGYYYYYGMDVW

SEQ ID NO: 56504 - protein, 20 aa, Homo sapiens
CARGPTSWASVTTANWFDPW

SEQ ID NO: 56505 - protein, 18 aa, Homo sapiens
CSKVAKNGYNLGSSFDYW

SEQ ID NO: 56506 - protein, 24 aa, Homo sapiens
CARDIYSRGVTTEDYYYYNGMDVW

SEQ ID NO: 56507 - protein, 25 aa, Homo sapiens
CARDQPRPTDYDSSGYYYSLGFDPW

SEQ ID NO: 56508 - protein, 11 aa, Homo sapiens
CAKGLRFFDHW

SEQ ID NO: 56509 - protein, 23 aa, Homo sapiens
CAREAPIGGVITSYPYYYGMDVW

SEQ ID NO: 56510 - protein, 15 aa, Homo sapiens
CARIQAVRGVSIDYW

SEQ ID NO: 56511 - protein, 16 aa, Homo sapiens
CARGTPHSGSNWFDPW

SEQ ID NO: 56512 - protein, 14 aa, Homo sapiens
CARDRSLGLPEDYW

SEQ ID NO: 56513 - protein, 17 aa, Homo sapiens
CAKDWHDYGDYEGFDYW

SEQ ID NO: 56514 - protein, 15 aa, Homo sapiens
CARGWELEAYALDYW

SEQ ID NO: 56515 - protein, 26 aa, Homo sapiens
CAGCIAFSGWFGELLPDYYYYGMDVW

SEQ ID NO: 56516 - protein, 22 aa, Homo sapiens
CARAGGLRYFDWSSPPDAFDIW

SEQ ID NO: 56517 - protein, 21 aa, Homo sapiens
CAKEGAGRAAGTLLNNWFDPW

SEQ ID NO: 56518 - protein, 17 aa, Homo sapiens
CARGREWLVGGNYFDYW

SEQ ID NO: 56519 - protein, 16 aa, Homo sapiens
CAKYTAASGGVVGDYW

SEQ ID NO: 56520 - protein, 24 aa, Homo sapiens
CARDTTVVVTATIPMYYYYGMDVW

SEQ ID NO: 56521 - protein, 24 aa, Homo sapiens
CAKHGYYTDSTGYYYDYYYGMDVW

SEQ ID NO: 56522 - protein, 14 aa, Homo sapiens
CAKIVVGAAYFDSW

SEQ ID NO: 56523 - protein, 17 aa, Homo sapiens
CARGGIAVAVLPTLDYW

SEQ ID NO: 56524 - protein, 24 aa, Homo sapiens
CTGGALPYYDILTGYYTEAGLDYW

SEQ ID NO: 56525 - protein, 15 aa, Homo sapiens
CAKEPNDREETFDIW

SEQ ID NO: 56526 - protein, 15 aa, Homo sapiens
CAIHYYDSSGYFYYW

SEQ ID NO: 56527 - protein, 24 aa, Homo sapiens
CAREGYLGYSYGYWLPKNNWFDPW

SEQ ID NO: 56528 - protein, 18 aa, Homo sapiens
CARHAPVVWFGLNLFDPW

SEQ ID NO: 56529 - protein, 16 aa, Homo sapiens
CARRPHYYGSVDFDYW

SEQ ID NO: 56530 - protein, 29 aa, Homo sapiens
CAKDSKYYDILTGYLRAPYYYYYYGMDVW

SEQ ID NO: 56531 - protein, 17 aa, Homo sapiens
CARHYGSGNYYTSLDYW

SEQ ID NO: 56532 - protein, 18 aa, Homo sapiens
CATSSPFGELLSNWFDPW

SEQ ID NO: 56533 - protein, 17 aa, Homo sapiens
CAKNRWIQLWLYWFDPW

SEQ ID NO: 56534 - protein, 19 aa, Homo sapiens
CARDEMVVAGYYYYGMDVW

SEQ ID NO: 56535 - protein, 17 aa, Homo sapiens
CARHSGSFYDVGAFEIW

SEQ ID NO: 56536 - protein, 24 aa, Homo sapiens
CARDTYYYGSGSYLNYYYYGMDVW

SEQ ID NO: 56537 - protein, 24 aa, Homo sapiens
CARERGVSGYCSGGSCPSWWFDPW

SEQ ID NO: 56538 - protein, 17 aa, Homo sapiens
CTTCVSPTCYHYAMDVW

SEQ ID NO: 56539 - protein, 21 aa, Homo sapiens
CARDIGLSRGPVYYYYGMDVW

SEQ ID NO: 56540 - protein, 23 aa, Homo sapiens
CARIPREELVLWSYYYYYGMDVW

SEQ ID NO: 56541 - protein, 23 aa, Homo sapiens
CASAHDGVVVPAAIWIEGAFDIW

SEQ ID NO: 56542 - protein, 20 aa, Homo sapiens
CARVPAAAGTWFYYYGMDVW

SEQ ID NO: 56543 - protein, 20 aa, Homo sapiens
CVHRDYDLSTGYSSGWFDPW

SEQ ID NO: 56544 - protein, 13 aa, Homo sapiens
CAKTDPEGSSDYW

SEQ ID NO: 56545 - protein, 22 aa, Homo sapiens
CARHHITLSSSWSLEVLYFDYW

SEQ ID NO: 56546 - protein, 18 aa, Homo sapiens
CAKSGTRDGYLRVYFDYW

SEQ ID NO: 56547 - protein, 15 aa, Homo sapiens
CAKFGATTFAAGDYW

SEQ ID NO: 56548 - protein, 18 aa, Homo sapiens
CARDTGHSGSAKNWLDPW

SEQ ID NO: 56549 - protein, 24 aa, Homo sapiens
CARDFRPFEWELLRGGYYYGMDVW

SEQ ID NO: 56550 - protein, 14 aa, Homo sapiens
CARRGYPVAGSDYW

SEQ ID NO: 56551 - protein, 18 aa, Homo sapiens
CAHRGKHYYDSTNWFDPW

SEQ ID NO: 56552 - protein, 23 aa, Homo sapiens
CAKEDRWWYYYDSSQTGNGFDYW

SEQ ID NO: 56553 - protein, 16 aa, Homo sapiens
CANGIITWIQLWFDYW

SEQ ID NO: 56554 - protein, 14 aa, Homo sapiens
CARMVAQGVLFDYW

SEQ ID NO: 56555 - protein, 21 aa, Homo sapiens
CAKHGYCGGDCYSVFRYFDLW

SEQ ID NO: 56556 - protein, 18 aa, Homo sapiens
CATERLSGSYYYYGMDVW

SEQ ID NO: 56557 - protein, 15 aa, Homo sapiens
CARGHGNRIRYFDLW

SEQ ID NO: 56558 - protein, 19 aa, Homo sapiens
CARDGGEPGTLVYNWFDPW

SEQ ID NO: 56559 - protein, 24 aa, Homo sapiens
CARGIEIPLLLWFGELGDWYFDLW

SEQ ID NO: 56560 - protein, 24 aa, Homo sapiens
CARSRGDIVVVTATPGYYYGMDVW

SEQ ID NO: 56561 - protein, 20 aa, Homo sapiens
CARGRRSGSSWPALYYFDYW

SEQ ID NO: 56562 - protein, 14 aa, Homo sapiens
CARTYSGYEPFDYW

SEQ ID NO: 56563 - protein, 16 aa, Homo sapiens
CAHRPSGYDGGYFDYW

SEQ ID NO: 56564 - protein, 18 aa, Homo sapiens
CARLSEYVSGSFIPFDIW

SEQ ID NO: 56565 - protein, 15 aa, Homo sapiens
CQSYDISLTGSPVVF

SEQ ID NO: 56566 - protein, 24 aa, Homo sapiens
CARDQTTPVLLWFGELYSALPDYW

SEQ ID NO: 56567 - protein, 20 aa, Homo sapiens
CAKDYYDSSGYYDSYGMDVW

SEQ ID NO: 56568 - protein, 20 aa, Homo sapiens
CARGGWIAAAGPAYNWFDPW

SEQ ID NO: 56569 - protein, 16 aa, Homo sapiens
CARDTPAADFYYFDYW

SEQ ID NO: 56570 - protein, 23 aa, Homo sapiens
CAREAVIPDPGIAAAATGLFDYW

SEQ ID NO: 56571 - protein, 15 aa, Homo sapiens
CARGREVHTPYFYFW

SEQ ID NO: 56572 - protein, 26 aa, Homo sapiens
CARVQREGYDYVWGSYRYTGSYFDYW

SEQ ID NO: 56573 - protein, 19 aa, Homo sapiens
CARDAPDYIVVVPAAIDYW

SEQ ID NO: 56574 - protein, 17 aa, Homo sapiens
CAKESSIDLMGDAFDIW

SEQ ID NO: 56575 - protein, 17 aa, Homo sapiens
CASSTLTGFHDDTFDLW

SEQ ID NO: 56576 - protein, 26 aa, Homo sapiens
CARAQDGYSSGWYVGNYYYYYGMDVW

SEQ ID NO: 56577 - protein, 13 aa, Homo sapiens
CAKLDSAWYNDYW

SEQ ID NO: 56578 - protein, 14 aa, Homo sapiens
CASQLGSYYAFDIW

SEQ ID NO: 56579 - protein, 18 aa, Homo sapiens
CARDHTWGYSRYNWFDPW

SEQ ID NO: 56580 - protein, 21 aa, Homo sapiens
CAKGKKGDCGSNTCHPNFDYW

SEQ ID NO: 56581 - protein, 17 aa, Homo sapiens
CAKTPSKGVTTLNFDYW

SEQ ID NO: 56582 - protein, 21 aa, Homo sapiens
CASLEGDYGDYIIGQQVVDYW

SEQ ID NO: 56583 - protein, 19 aa, Homo sapiens
CARDLCSSTTCYTLGLDYW

SEQ ID NO: 56584 - protein, 19 aa, Homo sapiens
CATGLLRYFDWLLYDQDYW

SEQ ID NO: 56585 - protein, 15 aa, Homo sapiens
CARGAAVTIFAMDVW

SEQ ID NO: 56586 - protein, 23 aa, Homo sapiens
CARDFVVTAMDDPYYYYYGMDVW

SEQ ID NO: 56587 - protein, 21 aa, Homo sapiens
CARHYTAILSRRATTGLFDSW

SEQ ID NO: 56588 - protein, 24 aa, Homo sapiens
CARGQRMFGDYVISYPLYYGMDVW

SEQ ID NO: 56589 - protein, 22 aa, Homo sapiens
CAAFHYYGSGSYYNVGWYFDLW

SEQ ID NO: 56590 - protein, 21 aa, Homo sapiens
CAKDSASVWFGELLLGGVDYW

SEQ ID NO: 56591 - protein, 14 aa, Homo sapiens
CASKLLLRSYFDYW

SEQ ID NO: 56592 - protein, 17 aa, Homo sapiens
CARLHGTGTYYTYFDYW

SEQ ID NO: 56593 - protein, 13 aa, Homo sapiens
CDTTGLPDSVDYW

SEQ ID NO: 56594 - protein, 21 aa, Homo sapiens
CARGWSFDYYGSGNERVSDYW

SEQ ID NO: 56595 - protein, 16 aa, Homo sapiens
CARDVSSSWFNWFDPW

SEQ ID NO: 56596 - protein, 24 aa, Homo sapiens
CARLNYLWYYYDSSGYYYNWFDPW

SEQ ID NO: 56597 - protein, 11 aa, Homo sapiens
CMDGTSWPKPF

SEQ ID NO: 56598 - protein, 24 aa, Homo sapiens
CAKSPPAGYDILTGYYIPYYFDYW

SEQ ID NO: 56599 - protein, 17 aa, Homo sapiens
CAHRHANYWGNDLFDVW

SEQ ID NO: 56600 - protein, 20 aa, Homo sapiens
CAKDYDYVWGSYRYTGSDYW

SEQ ID NO: 56601 - protein, 19 aa, Homo sapiens
CASDYSDWLLYTRGLFDYW

SEQ ID NO: 56602 - protein, 20 aa, Homo sapiens
CARHYYGSGIYYNVRWFDPW

SEQ ID NO: 56603 - protein, 19 aa, Homo sapiens
CAKDPRDTAMVRAYHFDYW

SEQ ID NO: 56604 - protein, 18 aa, Homo sapiens
CAKDDYGRLGIEPYFDYW

SEQ ID NO: 56605 - protein, 26 aa, Homo sapiens
CARDLLGRGEYGSGSRIYYYYGMDVW

SEQ ID NO: 56606 - protein, 23 aa, Homo sapiens
CAKDIDHELSRFGDLSHDAFDVW

SEQ ID NO: 56607 - protein, 22 aa, Homo sapiens
CARHLAGRMVRGVIRNNWFDPW

SEQ ID NO: 56608 - protein, 21 aa, Homo sapiens
CARVYYYGSGSYYGLNYFDYW

SEQ ID NO: 56609 - protein, 21 aa, Homo sapiens
CAKDWLERRSGDYYYYGMDVW

SEQ ID NO: 56610 - protein, 19 aa, Homo sapiens
CTQVEPDYYDSSGYYSVYW

SEQ ID NO: 56611 - protein, 25 aa, Homo sapiens
CAKDHFRWWLLLSGPPGYYYGMDVW

SEQ ID NO: 56612 - protein, 16 aa, Homo sapiens
CAKPRGGSYYGELDYW

SEQ ID NO: 56613 - protein, 15 aa, Homo sapiens
CARDVDAGSSYLDSW

SEQ ID NO: 56614 - protein, 21 aa, Homo sapiens
CARELYDSSGYYYGNLYFQHW

SEQ ID NO: 56615 - protein, 19 aa, Homo sapiens
CAASLWIRLDGYYYGMDVW

SEQ ID NO: 56616 - protein, 20 aa, Homo sapiens
CAHRRRGYYDSSGYYYWDYW

SEQ ID NO: 56617 - protein, 17 aa, Homo sapiens
CAKHKEMGATGSPFDIW

SEQ ID NO: 56618 - protein, 23 aa, Homo sapiens
CARLVWKAWIQPGSYYYYGMDVW

SEQ ID NO: 56619 - protein, 25 aa, Homo sapiens
CTTDFIEDDVDTAMVISYYYGMDVW

SEQ ID NO: 56620 - protein, 11 aa, Homo sapiens
CQHLNSYMITF

SEQ ID NO: 56621 - protein, 25 aa, Homo sapiens
CARGSKGYSSGWYPSYYYYYGMDVW

SEQ ID NO: 56622 - protein, 17 aa, Homo sapiens
CARDPTQDYGDPNFDYW

SEQ ID NO: 56623 - protein, 22 aa, Homo sapiens
CATSEYYYDSSGYPSYYGMDVW

SEQ ID NO: 56624 - protein, 21 aa, Homo sapiens
CASQRPARINWYGVGGAFDIW

SEQ ID NO: 56625 - protein, 16 aa, Homo sapiens
CVRNRYSGGWGYFDYW

SEQ ID NO: 56626 - protein, 17 aa, Homo sapiens
CAKDSFLWFGESSLDYW

SEQ ID NO: 56627 - protein, 19 aa, Homo sapiens
CARAYLGAVAAAVYYFDYW

SEQ ID NO: 56628 - protein, 23 aa, Homo sapiens
CAKFLGPYCSGGSCYSEMGMDYW

SEQ ID NO: 56629 - protein, 13 aa, Homo sapiens
CQQSYSTRSKWTF

SEQ ID NO: 56630 - protein, 21 aa, Homo sapiens
CARGDLSAAGDYYYYYGMDVW

SEQ ID NO: 56631 - protein, 21 aa, Homo sapiens
CARDLTMIVVVDYYYYGMDVW

SEQ ID NO: 56632 - protein, 24 aa, Homo sapiens
CARLHGGNYYGSGSYPNYYGMDVW

SEQ ID NO: 56633 - protein, 24 aa, Homo sapiens
CARESWYYDILTGYYLGNNWFDPW

SEQ ID NO: 56634 - protein, 17 aa, Homo sapiens
CARDLIEGGYYPWFDPW

SEQ ID NO: 56635 - protein, 16 aa, Homo sapiens
CARGGGDSGYDQFDNW

SEQ ID NO: 56636 - protein, 18 aa, Homo sapiens
CARGSSWHRLYYYGMDVW

SEQ ID NO: 56637 - protein, 18 aa, Homo sapiens
CAREGYSSSWVEAWFDYW

SEQ ID NO: 56638 - protein, 23 aa, Homo sapiens
CARHAWVITFGGVIVRGYYFDYW

SEQ ID NO: 56639 - protein, 20 aa, Homo sapiens
CTTDSVKVGLRWPVGYFDYW

SEQ ID NO: 56640 - protein, 16 aa, Homo sapiens
CARELSTVVTPVFDYW

SEQ ID NO: 56641 - protein, 22 aa, Homo sapiens
CTTDPTPYYDILTGHYVAFDVW

SEQ ID NO: 56642 - protein, 18 aa, Homo sapiens
CAHRTYSGSYFGAYFDYW

SEQ ID NO: 56643 - protein, 14 aa, Homo sapiens
CASQQWRRGSVDYW

SEQ ID NO: 56644 - protein, 18 aa, Homo sapiens
CAKFRSTYGGSPDYFDYW

SEQ ID NO: 56645 - protein, 19 aa, Homo sapiens
CARDFGVEMATIGPPRDYW

SEQ ID NO: 56646 - protein, 28 aa, Homo sapiens
CARTQYNTYYDILTGYEGGYYYYGMDVW

SEQ ID NO: 56647 - protein, 19 aa, Homo sapiens
CARDRFRDHGTAMGFFDPW

SEQ ID NO: 56648 - protein, 20 aa, Homo sapiens
CARDSSGWYPPPGDDAFDIW

SEQ ID NO: 56649 - protein, 18 aa, Homo sapiens
CARGGWAAAGRGWYFDLW

SEQ ID NO: 56650 - protein, 14 aa, Homo sapiens
CARAPQQWLPLDYW

SEQ ID NO: 56651 - protein, 18 aa, Homo sapiens
CARIDFRDGYNYGYFDYW

SEQ ID NO: 56652 - protein, 20 aa, Homo sapiens
CARVGSRLWQTLYYYGMDVW

SEQ ID NO: 56653 - protein, 18 aa, Homo sapiens
CARDAGESSGWLSNFDYW

SEQ ID NO: 56654 - protein, 14 aa, Homo sapiens
CARTSFPSWGFDPW

SEQ ID NO: 56655 - protein, 20 aa, Homo sapiens
CASSPPFLGIAAAGGAFDIW

SEQ ID NO: 56656 - protein, 17 aa, Homo sapiens
CARQWGSIAVAGQLDYW

SEQ ID NO: 56657 - protein, 21 aa, Homo sapiens
CARGWAYYYDSSGYNWSFDYW

SEQ ID NO: 56658 - protein, 17 aa, Homo sapiens
CARAPTLWVSSWEFDYW

SEQ ID NO: 56659 - protein, 16 aa, Homo sapiens
CAKGRSSWQNFVPDYW

SEQ ID NO: 56660 - protein, 19 aa, Homo sapiens
CARHEWLWFGESLNWFDPW

SEQ ID NO: 56661 - protein, 16 aa, Homo sapiens
CAKDLVDSYGFWHDYW

SEQ ID NO: 56662 - protein, 23 aa, Homo sapiens
CARDNRICGGDCGYYYYYGMDVW

SEQ ID NO: 56663 - protein, 14 aa, Homo sapiens
CARNGYGPGGYDYW

SEQ ID NO: 56664 - protein, 21 aa, Homo sapiens
CARDSDHYDFLTGYYPHFDYW

SEQ ID NO: 56665 - protein, 19 aa, Homo sapiens
CARDGGYDILTGYHRPDYW

SEQ ID NO: 56666 - protein, 14 aa, Homo sapiens
CARALTTGDAFDFW

SEQ ID NO: 56667 - protein, 17 aa, Homo sapiens
CARNRYFDWSSHYFDYW

SEQ ID NO: 56668 - protein, 23 aa, Homo sapiens
CARLSESAYYYDSSRPMGAFDIW

SEQ ID NO: 56669 - protein, 18 aa, Homo sapiens
CARAQYSSSWGPNWFDPW

SEQ ID NO: 56670 - protein, 16 aa, Homo sapiens
CARVYNGDYWEDGDYW

SEQ ID NO: 56671 - protein, 26 aa, Homo sapiens
CARGGDDCSGGSCYSLMIYYYGMDVW

SEQ ID NO: 56672 - protein, 24 aa, Homo sapiens
CASSPATYYDILTGYYTLYQFDYW

SEQ ID NO: 56673 - protein, 18 aa, Homo sapiens
CARDDKGYDYLTRPFDYW

SEQ ID NO: 56674 - protein, 18 aa, Homo sapiens
CARDPCGGDCYTNWFDPW

SEQ ID NO: 56675 - protein, 17 aa, Homo sapiens
CARDSIQLIRSGYFDYW

SEQ ID NO: 56676 - protein, 14 aa, Homo sapiens
CTRVWIGELLLDYW

SEQ ID NO: 56677 - protein, 18 aa, Homo sapiens
CARGDSTTVVRGDYFDYW

SEQ ID NO: 56678 - protein, 19 aa, Homo sapiens
CARVGLGSGYDFDWYFDLW

SEQ ID NO: 56679 - protein, 17 aa, Homo sapiens
CARDDINTMTTDWFDPW

SEQ ID NO: 56680 - protein, 19 aa, Homo sapiens
CARQGPDRVGATSNAFDIW

SEQ ID NO: 56681 - protein, 23 aa, Homo sapiens
CARAGWVRGGIAAAGTYNWFDPW

SEQ ID NO: 56682 - protein, 18 aa, Homo sapiens
CARGWGYGGSLEYYFDYW

SEQ ID NO: 56683 - protein, 25 aa, Homo sapiens
CAKTYYVATSTFSSSWYVAPSFDYW

SEQ ID NO: 56684 - protein, 20 aa, Homo sapiens
CAKERVAAAGTSYYYGMDVW

SEQ ID NO: 56685 - protein, 21 aa, Homo sapiens
CARGKILWFGELASLSWFDPW

SEQ ID NO: 56686 - protein, 14 aa, Homo sapiens
CARTFNTVTPFDYW

SEQ ID NO: 56687 - protein, 14 aa, Homo sapiens
CSTLSGYSNLIDPW

SEQ ID NO: 56688 - protein, 23 aa, Homo sapiens
CAREGAYHYYDSSGYYGSHFDYW

SEQ ID NO: 56689 - protein, 16 aa, Homo sapiens
CTTDFYGDQGYYFDYW

SEQ ID NO: 56690 - protein, 17 aa, Homo sapiens
CTTDILILGTTSYFDYW

SEQ ID NO: 56691 - protein, 21 aa, Homo sapiens
CTRANPLIQWLVHKTYYFDYW

SEQ ID NO: 56692 - protein, 18 aa, Homo sapiens
CAISILYYDSSGYHPDYW

SEQ ID NO: 56693 - protein, 22 aa, Homo sapiens
CARGGLSVGQWLVLVAYYFDYW

SEQ ID NO: 56694 - protein, 15 aa, Homo sapiens
CARQPPLLWHAFDIW

SEQ ID NO: 56695 - protein, 22 aa, Homo sapiens
CARDGVYSYGSHRYNPDAMDVW

SEQ ID NO: 56696 - protein, 22 aa, Homo sapiens
CARDSPFPDTMIQVAMYYFDYW

SEQ ID NO: 56697 - protein, 14 aa, Homo sapiens
CARMVVVVNAFDIW

SEQ ID NO: 56698 - protein, 16 aa, Homo sapiens
CAHRPAWGAAALYDYW

SEQ ID NO: 56699 - protein, 17 aa, Homo sapiens
CSRFGMLRDIILGFDHW

SEQ ID NO: 56700 - protein, 14 aa, Homo sapiens
CAREMATMVGFDPW

SEQ ID NO: 56701 - protein, 17 aa, Homo sapiens
CATERSVSHSSGVFDYW

SEQ ID NO: 56702 - protein, 22 aa, Homo sapiens
CARIGEDYYDSSGYLVGAFDIW

SEQ ID NO: 56703 - protein, 22 aa, Homo sapiens
CARVHPDYDILTGYYHAGFDYW

SEQ ID NO: 56704 - protein, 15 aa, Homo sapiens
CAKESGSYHSRLDYW

SEQ ID NO: 56705 - protein, 23 aa, Homo sapiens
CAHRQSAYDILTGYYPTPYFDYW

SEQ ID NO: 56706 - protein, 18 aa, Homo sapiens
CATPGYNLYYYYYGMDVW

SEQ ID NO: 56707 - protein, 22 aa, Homo sapiens
CAKDGGPPADYGDYGPWYFDLW

SEQ ID NO: 56708 - protein, 14 aa, Homo sapiens
CARSYSTHLPNDYW

SEQ ID NO: 56709 - protein, 23 aa, Homo sapiens
CAKPLAGTNYYDSSGYYGYFQHW

SEQ ID NO: 56710 - protein, 27 aa, Homo sapiens
CARDRGTYYYDSSGQGTLYYYYGMDVW

SEQ ID NO: 56711 - protein, 19 aa, Homo sapiens
CAGARITMVRGVIIGFDPW

SEQ ID NO: 56712 - protein, 20 aa, Homo sapiens
CAKAEGAYCSGGSCYLLDYW

SEQ ID NO: 56713 - protein, 21 aa, Homo sapiens
CARSYSSPLDGDNYRGDFDYW

SEQ ID NO: 56714 - protein, 24 aa, Homo sapiens
CAREEHYYDSSGYFSTEIRAFDYW

SEQ ID NO: 56715 - protein, 20 aa, Homo sapiens
CARVHGWLRSRNVNGAFDIW

SEQ ID NO: 56716 - protein, 33 aa, Homo sapiens
CAKDTEYYDILTGYYIAPATVYSGYYYYGMDVW

SEQ ID NO: 56717 - protein, 21 aa, Homo sapiens
CARDGASLDVATAIPKAFDMW

SEQ ID NO: 56718 - protein, 18 aa, Homo sapiens
CAHRPGIMVRGGFRFDPW

SEQ ID NO: 56719 - protein, 22 aa, Homo sapiens
CARENYYDSSGYYYDQNWFDPW

SEQ ID NO: 56720 - protein, 22 aa, Homo sapiens
CASRAISGRHTYYYYYYGMDVW

SEQ ID NO: 56721 - protein, 19 aa, Homo sapiens
CARPSAGATDYYYYGMDVW

SEQ ID NO: 56722 - protein, 17 aa, Homo sapiens
CARDGVYGDYGNHDDYW

SEQ ID NO: 56723 - protein, 27 aa, Homo sapiens
CARSGPKTYYDILTGYQDYYYYGMDVW

SEQ ID NO: 56724 - protein, 16 aa, Homo sapiens
CAKEKQQWLDGDIDYW

SEQ ID NO: 56725 - protein, 21 aa, Homo sapiens
CARDYNGSGSYYWASDALDLW

SEQ ID NO: 56726 - protein, 22 aa, Homo sapiens
CARKENLGSSWSYYYYYGMDVW

SEQ ID NO: 56727 - protein, 17 aa, Homo sapiens
CARVGTEGTFSNWFDPW

SEQ ID NO: 56728 - protein, 17 aa, Homo sapiens
CAVVAGSSWLPHYFDYW

SEQ ID NO: 56729 - protein, 18 aa, Homo sapiens
CAKEGGGSYYGGGYFDYW

SEQ ID NO: 56730 - protein, 13 aa, Homo sapiens
CARGVFDWPFDYW

SEQ ID NO: 56731 - protein, 24 aa, Homo sapiens
CARGPGTSYDILTGYYISGWFDPW

SEQ ID NO: 56732 - protein, 22 aa, Homo sapiens
CARFPYVWFGELWGSAGWFDPW

SEQ ID NO: 56733 - protein, 20 aa, Homo sapiens
CARGYWILYGGYYYYGMDVW

SEQ ID NO: 56734 - protein, 17 aa, Homo sapiens
CAKELYPFYDNSGFDYW

SEQ ID NO: 56735 - protein, 20 aa, Homo sapiens
CVGGKTEMWFNKYYYAMDVW

SEQ ID NO: 56736 - protein, 22 aa, Homo sapiens
CTTDYTAADYDYVWGSYGFDYW

SEQ ID NO: 56737 - protein, 21 aa, Homo sapiens
CATSEVIAVAGYYYYYGMDVW

SEQ ID NO: 56738 - protein, 24 aa, Homo sapiens
CARLQSSLRWLQLNYYYYYGMDVW

SEQ ID NO: 56739 - protein, 29 aa, Homo sapiens
CARDGPPFNYDILTGYAGGYYYYYGMDVW

SEQ ID NO: 56740 - protein, 13 aa, Homo sapiens
CVRVTGDRYFDLW

SEQ ID NO: 56741 - protein, 15 aa, Homo sapiens
CATRGKAAGRIFDYW

SEQ ID NO: 56742 - protein, 19 aa, Homo sapiens
CARDERGTYSSGWYEIDYW

SEQ ID NO: 56743 - protein, 21 aa, Homo sapiens
CAKSDPPHYSSSWYSNWFDPW

SEQ ID NO: 56744 - protein, 18 aa, Homo sapiens
CARELRYFDWLSPYFDLW

SEQ ID NO: 56745 - protein, 16 aa, Homo sapiens
CARPVGGSYFKPFDYW

SEQ ID NO: 56746 - protein, 22 aa, Homo sapiens
CAKDSGWSGSPISKLNRGIDYW

SEQ ID NO: 56747 - protein, 14 aa, Homo sapiens
CAHRPPWIQLFDPW

SEQ ID NO: 56748 - protein, 13 aa, Homo sapiens
CAKMVAAAGHDYW

SEQ ID NO: 56749 - protein, 20 aa, Homo sapiens
CASGLAHSSGWYSHWYFDLW

SEQ ID NO: 56750 - protein, 16 aa, Homo sapiens
CASGALWSPNIYFDYW

SEQ ID NO: 56751 - protein, 20 aa, Homo sapiens
CARSVGVGREWELKFYFDYW

SEQ ID NO: 56752 - protein, 23 aa, Homo sapiens
CARDAMSFSITMIVVSLGAFDIW

SEQ ID NO: 56753 - protein, 27 aa, Homo sapiens
CARDGWSPDCSGGSCYSNIYYYGMDVW

SEQ ID NO: 56754 - protein, 15 aa, Homo sapiens
CATLLYLGDTGFDYW

SEQ ID NO: 56755 - protein, 24 aa, Homo sapiens
CASDTPNDIVAAMGYYYYYGMDVW

SEQ ID NO: 56756 - protein, 23 aa, Homo sapiens
CASEPYSSSWYVPGDYYYGMDVW

SEQ ID NO: 56757 - protein, 16 aa, Homo sapiens
CARTALQNTVAGIDYW

SEQ ID NO: 56758 - protein, 19 aa, Homo sapiens
CARAVWFGDPFHEGYFDYW

SEQ ID NO: 56759 - protein, 16 aa, Homo sapiens
CARFGGSYKKYYFDYW

SEQ ID NO: 56760 - protein, 18 aa, Homo sapiens
CASSLPVRGVSTYYFDYW

SEQ ID NO: 56761 - protein, 24 aa, Homo sapiens
CARDHTTYYYDSSGYYEEYYFDYW

SEQ ID NO: 56762 - protein, 23 aa, Homo sapiens
CATEGARAATIKGDYYYYGMDVW

SEQ ID NO: 56763 - protein, 16 aa, Homo sapiens
CARDLAFGGVIDNDYW

SEQ ID NO: 56764 - protein, 17 aa, Homo sapiens
CARAGSGSYEDNWFHPW

SEQ ID NO: 56765 - protein, 19 aa, Homo sapiens
CARESAAADNWGSNYFDYW

SEQ ID NO: 56766 - protein, 24 aa, Homo sapiens
CARGPAVNYDILTGYYISGYFDYW

SEQ ID NO: 56767 - protein, 24 aa, Homo sapiens
CAKDRLSVDWLFRASYYYYGMDVW

SEQ ID NO: 56768 - protein, 11 aa, Homo sapiens [sequence omitted]

SEQ ID NO: 56769 - protein, 26 aa, Homo sapiens
CATVTLGYYYGSGSYYRIYYYGMDVW

SEQ ID NO: 56770 - protein, 13 aa, Homo sapiens
CAHRTAIFNFAYW

SEQ ID NO: 56771 - protein, 20 aa, Homo sapiens
CASSIAEQLVRLYYYGMDVW

SEQ ID NO: 56772 - protein, 16 aa, Homo sapiens
CATGFTSGWSDAFDIW

SEQ ID NO: 56773 - protein, 21 aa, Homo sapiens
CARVSQSGSYLFAVVGAFDIW

SEQ ID NO: 56774 - protein, 23 aa, Homo sapiens
CARQTSPGILWFGELGGGAFDIW

SEQ ID NO: 56775 - protein, 20 aa, Homo sapiens
CARDPPATIYSSSSEYFDYW

SEQ ID NO: 56776 - protein, 16 aa, Homo sapiens
CARGRDSTYRTAFDIW

SEQ ID NO: 56777 - protein, 18 aa, Homo sapiens
CSRRECSRTSCPVNFDYW

SEQ ID NO: 56778 - protein, 23 aa, Homo sapiens
CARDLKSYGGNSGYYYYYGMDVW

SEQ ID NO: 56779 - protein, 20 aa, Homo sapiens
CAKADGSGSYYPVTDAFDIW

SEQ ID NO: 56780 - protein, 16 aa, Homo sapiens
CAKKGRIAAAGIFDYW

SEQ ID NO: 56781 - protein, 16 aa, Homo sapiens
CAGRSWYEGSEYFQHW

SEQ ID NO: 56782 - protein, 18 aa, Homo sapiens
CQTWGSGIQTWGTGIRVF

SEQ ID NO: 56783 - protein, 26 aa, Homo sapiens
CASELDIVVVPAAMRPVDYYYGMDVW

SEQ ID NO: 56784 - protein, 20 aa, Homo sapiens
CATFIGYSSSWYRVEYFQHW

SEQ ID NO: 56785 - protein, 20 aa, Homo sapiens
CAKQSRSPWELPGPDAFDIW

SEQ ID NO: 56786 - protein, 16 aa, Homo sapiens
CARKRWFGEGFYFDFW

SEQ ID NO: 56787 - protein, 23 aa, Homo sapiens
CARTEEYYDILTGYYNLYYFDYW

SEQ ID NO: 56788 - protein, 17 aa, Homo sapiens
CAKASYGGNSEAHFDYW

SEQ ID NO: 56789 - protein, 16 aa, Homo sapiens
CARSYSFGYSYDFDYW

SEQ ID NO: 56790 - protein, 16 aa, Homo sapiens
CAREDSSGYFGWFDPW

SEQ ID NO: 56791 - protein, 23 aa, Homo sapiens
CTSDGGVGATLGVYYYYYGLDVW

SEQ ID NO: 56792 - protein, 14 aa, Homo sapiens
CARTPAMTATFDYW

SEQ ID NO: 56793 - protein, 19 aa, Homo sapiens
CARGGREVVVARLNILDYW

SEQ ID NO: 56794 - protein, 27 aa, Homo sapiens
CARDRQLVVVPVTSPESYYYYYGMDVW

SEQ ID NO: 56795 - protein, 22 aa, Homo sapiens
CARADRNCTSTTCYGRYYFTDW

SEQ ID NO: 56796 - protein, 23 aa, Homo sapiens
CARDLGVREWELIHYYYYGMDVW

SEQ ID NO: 56797 - protein, 23 aa, Homo sapiens
CARHFRQWYDSSGFVNSAAFDIW

SEQ ID NO: 56798 - protein, 20 aa, Homo sapiens
CARGVIYFDSSALPNYFDPW

SEQ ID NO: 56799 - protein, 19 aa, Homo sapiens
CARGEGGSSWYQNSPSDYW

SEQ ID NO: 56800 - protein, 16 aa, Homo sapiens
CASLSSSWFPSHFDYW

SEQ ID NO: 56801 - protein, 15 aa, Homo sapiens
CAKLWVTPHEYFDLW

SEQ ID NO: 56802 - protein, 21 aa, Homo sapiens
CARDHWDTAMVRAREAYFDYW

SEQ ID NO: 56803 - protein, 25 aa, Homo sapiens
CARRRWESRYSSGWYDYYYYGMDVW

SEQ ID NO: 56804 - protein, 17 aa, Homo sapiens
CAKDRRRIVVAGGFDYW

SEQ ID NO: 56805 - protein, 19 aa, Homo sapiens
CARWNYYDSSGYKNAFDIW

SEQ ID NO: 56806 - protein, 14 aa, Homo sapiens
CAKSGLRWGWIDYW

SEQ ID NO: 56807 - protein, 13 aa, Homo sapiens
CAKLPESDAFDIW

SEQ ID NO: 56808 - protein, 23 aa, Homo sapiens
CARGPPASSSWSIYHGVGYFQHW

SEQ ID NO: 56809 - protein, 16 aa, Homo sapiens
CAREGGALELPGLDYW

SEQ ID NO: 56810 - protein, 27 aa, Homo sapiens
CARAHWTTVTTGRVRGKGYYYYGMDVW

SEQ ID NO: 56811 - protein, 18 aa, Homo sapiens
CARGFVGYDGGWYYFDYW

SEQ ID NO: 56812 - protein, 20 aa, Homo sapiens
CARDGPSSGGHYYYYGMDVW

SEQ ID NO: 56813 - protein, 17 aa, Homo sapiens
CAKDMGDGYNFAALDYW

SEQ ID NO: 56814 - protein, 18 aa, Homo sapiens
CARAVAQAPHARVGFDMW

SEQ ID NO: 56815 - protein, 16 aa, Homo sapiens
CARDPPVRSSVLFDPW

SEQ ID NO: 56816 - protein, 21 aa, Homo sapiens
CARARGLPYGDYYYYYGMDVW

SEQ ID NO: 56817 - protein, 21 aa, Homo sapiens
CARADGPWRYSYGGHLYFDYW

SEQ ID NO: 56818 - protein, 16 aa, Homo sapiens
CARDKWEGSSSWNDYW

SEQ ID NO: 56819 - protein, 26 aa, Homo sapiens
CARDLTEVVVVAATRDWYYYYGMDVW

SEQ ID NO: 56820 - protein, 15 aa, Homo sapiens
CARRSSGWSRYHDYW

SEQ ID NO: 56821 - protein, 16 aa, Homo sapiens
CAKLAQYSSSLLHDYW

SEQ ID NO: 56822 - protein, 13 aa, Homo sapiens
CSFSRYSLGLDYW

SEQ ID NO: 56823 - protein, 17 aa, Homo sapiens
CAMAGGSSWSKTYFDYW

SEQ ID NO: 56824 - protein, 21 aa, Homo sapiens
CARGGRGWFGEPLFRYYFDYW

SEQ ID NO: 56825 - protein, 17 aa, Homo sapiens
CAREDGPAADRGAFDVW

SEQ ID NO: 56826 - protein, 14 aa, Homo sapiens
CARMVSSCVCEDYW

SEQ ID NO: 56827 - protein, 18 aa, Homo sapiens
CATTTPLGAITYHPFDYW

SEQ ID NO: 56828 - protein, 20 aa, Homo sapiens
CAKDPLNCGGDCLGARFDYW

SEQ ID NO: 56829 - protein, 21 aa, Homo sapiens
CARGGWYSGGPVKVFNWFDPW

SEQ ID NO: 56830 - protein, 26 aa, Homo sapiens
CARDDLVPAATYGGSASYYYYGLDVW

SEQ ID NO: 56831 - protein, 22 aa, Homo sapiens
CTTDPFHAYYDILTGYYLLDYW

SEQ ID NO: 56832 - protein, 20 aa, Homo sapiens
CARGQGRYSSGWYFTPIDYW

SEQ ID NO: 56833 - protein, 23 aa, Homo sapiens
CARGGGDPYCSGGSCYFRGDDYW

SEQ ID NO: 56834 - protein, 27 aa, Homo sapiens
CAKDFYHYCSGGSCYSDLSGPYYFDYW

SEQ ID NO: 56835 - protein, 17 aa, Homo sapiens
CARGQAINWNDEYFDYW

SEQ ID NO: 56836 - protein, 18 aa, Homo sapiens
CTRDGEWLSLPSDAYDVW

SEQ ID NO: 56837 - protein, 22 aa, Homo sapiens
CAREETPRSSWYRYYYYGMDVW

SEQ ID NO: 56838 - protein, 18 aa, Homo sapiens
CAIGYCGRNCHLGAFEYW

SEQ ID NO: 56839 - protein, 17 aa, Homo sapiens
CARGSRRQWPYDAFDIW

SEQ ID NO: 56840 - protein, 13 aa, Homo sapiens
CARASGSGKPDYW

SEQ ID NO: 56841 - protein, 16 aa, Homo sapiens
CARMGYSYGYGAFDIW

SEQ ID NO: 56842 - protein, 22 aa, Homo sapiens
CAKDVYIRGVSSEYYYYGMDVW

SEQ ID NO: 56843 - protein, 15 aa, Homo sapiens
CARIDVRGVIKVDYW

SEQ ID NO: 56844 - protein, 25 aa, Homo sapiens
CARVWPGRGYSGYDDYYYYYGMDVW

SEQ ID NO: 56845 - protein, 18 aa, Homo sapiens
CARESTGNSGYYHLFDLW

SEQ ID NO: 56846 - protein, 16 aa, Homo sapiens
CARVAGDSSGYYFQDW

SEQ ID NO: 56847 - protein, 22 aa, Homo sapiens
CARVGPHGSGSYYNPPSGLDYW

SEQ ID NO: 56848 - protein, 14 aa, Homo sapiens
CAHYKTTLSAFDIW

SEQ ID NO: 56849 - protein, 14 aa, Homo sapiens
CAKIHGSGSSYDYW

SEQ ID NO: 56850 - protein, 24 aa, Homo sapiens
CARDKPRQYIYGQGLYYYYGMDVW

SEQ ID NO: 56851 - protein, 16 aa, Homo sapiens
CARIRRSWIHSALDYW

SEQ ID NO: 56852 - protein, 17 aa, Homo sapiens
CARVMADIFMSSWFDPW

SEQ ID NO: 56853 - protein, 20 aa, Homo sapiens
CARAGWARLDGVNYNWFDPW

SEQ ID NO: 56854 - protein, 22 aa, Homo sapiens
CARDQAFTAMAAYYYYYGMDVW

SEQ ID NO: 56855 - protein, 23 aa, Homo sapiens
CARDIPFSYNNWNDVKSDAFDIW

SEQ ID NO: 56856 - protein, 21 aa, Homo sapiens
CARDRNYDSSGYYSGDWFDPW

SEQ ID NO: 56857 - protein, 20 aa, Homo sapiens
CAIKAIAAAGTNYYYGMDVW

SEQ ID NO: 56858 - protein, 17 aa, Homo sapiens
CASTKVGPTTRYAFDIW

SEQ ID NO: 56859 - protein, 19 aa, Homo sapiens
CAREAGLYYGNRKYYFDYW

SEQ ID NO: 56860 - protein, 19 aa, Homo sapiens
CARETGQQPFGADNWFDPW

SEQ ID NO: 56861 - protein, 20 aa, Homo sapiens
CARGHTAYSLGWHPTQFDSW

SEQ ID NO: 56862 - protein, 21 aa, Homo sapiens
CAREGTTYDILTGYSEYFQHW

SEQ ID NO: 56863 - protein, 20 aa, Homo sapiens
CARPVYSDGGGFYYYGMDVW

SEQ ID NO: 56864 - protein, 17 aa, Homo sapiens
CARKVGSGWSDDAFDIW

SEQ ID NO: 56865 - protein, 16 aa, Homo sapiens
CAHRPAGFGSAAFDIW

SEQ ID NO: 56866 - protein, 15 aa, Homo sapiens
CARDAGSGWPIFDSW

SEQ ID NO: 56867 - protein, 26 aa, Homo sapiens
CAREYWLRSPFRLNEQNYYYYGMDVW

SEQ ID NO: 56868 - protein, 18 aa, Homo sapiens
CAREVYSSSQRYDAFDIW

SEQ ID NO: 56869 - protein, 9 aa, Homo sapiens
CEVGSGDYW

SEQ ID NO: 56870 - protein, 17 aa, Homo sapiens
CASPSGWYYYYYGMDVW

SEQ ID NO: 56871 - protein, 21 aa, Homo sapiens
CARTHFDWLLYSYYYYGMDVW

SEQ ID NO: 56872 - protein, 20 aa, Homo sapiens
CARERLVGPTNYYYYGMDVW

SEQ ID NO: 56873 - protein, 20 aa, Homo sapiens
CAREGGSYLLYYYYYGMDVW

SEQ ID NO: 56874 - protein, 24 aa, Homo sapiens
CARVGAKIQLWPVPLYYLSPFDYW

SEQ ID NO: 56875 - protein, 24 aa, Homo sapiens
CARDWARKTVVVVAATPTHWFDPW

SEQ ID NO: 56876 - protein, 15 aa, Homo sapiens
CARDGAELGTEFDYW

SEQ ID NO: 56877 - protein, 15 aa, Homo sapiens
CAKRIHGDYGSFDYW

SEQ ID NO: 56878 - protein, 21 aa, Homo sapiens
CATQVWAWLVRERYYYGMDVW

SEQ ID NO: 56879 - protein, 17 aa, Homo sapiens
CAKEVVVPAAISYFDYW

SEQ ID NO: 56880 - protein, 17 aa, Homo sapiens
CAKDMGSGWINNAFDIW

SEQ ID NO: 56881 - protein, 22 aa, Homo sapiens
CARLWREDYDILTGFFYYFDYW

SEQ ID NO: 56882 - protein, 14 aa, Homo sapiens
CARAFDWSRRLDYW

SEQ ID NO: 56883 - protein, 22 aa, Homo sapiens
CARSRVGLLTPGVYYYYGMDVW

SEQ ID NO: 56884 - protein, 22 aa, Homo sapiens
CARATGLRYFDWLYPSYYFDYW

SEQ ID NO: 56885 - protein, 12 aa, Homo sapiens
CAIGTKTYLDYW

SEQ ID NO: 56886 - protein, 30 aa, Homo sapiens
CARAGSGEGGFGELYILFGADYYYYGMDVW

SEQ ID NO: 56887 - protein, 23 aa, Homo sapiens
CARVVTVLDYYDSSGYYPTFDYW

SEQ ID NO: 56888 - protein, 25 aa, Homo sapiens
CARYFRGIVVVPAAPYDYYYGMDVW

SEQ ID NO: 56889 - protein, 20 aa, Homo sapiens
CAIQCGVSDDSSGSHCLDYW

SEQ ID NO: 56890 - protein, 15 aa, Homo sapiens
CARVGALWELLFDYW

SEQ ID NO: 56891 - protein, 19 aa, Homo sapiens
CARGGVTFNSSGWLLNDYW

SEQ ID NO: 56892 - protein, 21 aa, Homo sapiens
CARDFLAGSYGYYYYYGMDVW

SEQ ID NO: 56893 - protein, 24 aa, Homo sapiens
CAHRRGGRRSTTVRGVIWDAFDIW

SEQ ID NO: 56894 - protein, 15 aa, Homo sapiens
CARAPLGPWVGIDYW

SEQ ID NO: 56895 - protein, 21 aa, Homo sapiens
CARDAFRPWQWLGSYWYFDLW

SEQ ID NO: 56896 - protein, 14 aa, Homo sapiens
CVREATIGAWFDPW

SEQ ID NO: 56897 - protein, 18 aa, Homo sapiens
CAKDPGGLQYYYYGMDVW

SEQ ID NO: 56898 - protein, 21 aa, Homo sapiens
CARAAQTTVTTFNYYYGMDVW

SEQ ID NO: 56899 - protein, 20 aa, Homo sapiens
CARSPLRSTPGYYYYGMDVW

SEQ ID NO: 56900 - protein, 22 aa, Homo sapiens
CARDHYDILTDYVYYYYGMDVW

SEQ ID NO: 56901 - protein, 14 aa, Homo sapiens
CARGLSWMVRFDPW

SEQ ID NO: 56902 - protein, 16 aa, Homo sapiens
CAKADGWWKEGAIDYW

SEQ ID NO: 56903 - protein, 20 aa, Homo sapiens
CAKDPRPGQYDSSGYYFDHW

SEQ ID NO: 56904 - protein, 18 aa, Homo sapiens
CARELYLITMVRGALDYW

SEQ ID NO: 56905 - protein, 19 aa, Homo sapiens
CAKDVDYGSGSYEPYFDYW

SEQ ID NO: 56906 - protein, 18 aa, Homo sapiens
CARHDDPAVAGTGSFDYW

SEQ ID NO: 56907 - protein, 19 aa, Homo sapiens
CARDYIPMVRGIVMRLDYW

SEQ ID NO: 56908 - protein, 25 aa, Homo sapiens
CARALAYDVLTGYLPGPDRIWFDPW

SEQ ID NO: 56909 - protein, 15 aa, Homo sapiens
CAKDRGVGSTEFDYW

SEQ ID NO: 56910 - protein, 19 aa, Homo sapiens
CARARRRWLQLQFGAFDIW

SEQ ID NO: 56911 - protein, 20 aa, Homo sapiens
CAREDVEMDTMFPSNWFDPW

SEQ ID NO: 56912 - protein, 24 aa, Homo sapiens
CARHDPPYYDILTGYSLSCAFDIW

SEQ ID NO: 56913 - protein, 19 aa, Homo sapiens
CARGLWLVPEDYFHAMDVW

SEQ ID NO: 56914 - protein, 21 aa, Homo sapiens
CARGEVQRSVHAGMVYYFDYW

SEQ ID NO: 56915 - protein, 19 aa, Homo sapiens
CAKKVASYYDILTGYFDYW

SEQ ID NO: 56916 - protein, 23 aa, Homo sapiens
CARVGYYDSSAYNRQEPGYFDSW

SEQ ID NO: 56917 - protein, 18 aa, Homo sapiens
CAKGHSSSWYGVGYFQHW

SEQ ID NO: 56918 - protein, 18 aa, Homo sapiens
CAHRHEWRLRWSGQFDYW

SEQ ID NO: 56919 - protein, 19 aa, Homo sapiens
CARTFLLYNWNDEDAFDIW

SEQ ID NO: 56920 - protein, 20 aa, Homo sapiens
CARDSEELGMNYYYYGMDVW

SEQ ID NO: 56921 - protein, 22 aa, Homo sapiens
CARASGDIEVTGTDYYYGMDVW

SEQ ID NO: 56922 - protein, 15 aa, Homo sapiens
CATDQSGWGSCYDYW

SEQ ID NO: 56923 - protein, 20 aa, Homo sapiens
CARHGAITLIVEAPPHFDYW

SEQ ID NO: 56924 - protein, 19 aa, Homo sapiens
CARDFPYDSSGYGYYFDSW

SEQ ID NO: 56925 - protein, 27 aa, Homo sapiens
CAKASTSPRGSGWYDAPAYYYYAMDVW

SEQ ID NO: 56926 - protein, 17 aa, Homo sapiens
CASWDYDSSGYQPLDYW

SEQ ID NO: 56927 - protein, 13 aa, Homo sapiens
CMQATQFPPRYSF

SEQ ID NO: 56928 - protein, 23 aa, Homo sapiens
CTRDKRYFDWLSRGYYYYGMDVW

SEQ ID NO: 56929 - protein, 18 aa, Homo sapiens
CARQNFLEMTTIFPFDLW

SEQ ID NO: 56930 - protein, 24 aa, Homo sapiens
CAKDMIPDYYGSGSYYSLGIFDYW

SEQ ID NO: 56931 - protein, 22 aa, Homo sapiens
CARAIYYGSGRLGYYYYGMDVW

SEQ ID NO: 56932 - protein, 15 aa, Homo sapiens
CHSSSWYWGDGMDVW

SEQ ID NO: 56933 - protein, 15 aa, Homo sapiens
CARALLSNFGDFDYW

SEQ ID NO: 56934 - protein, 18 aa, Homo sapiens
CAKVTAPYYYYYYGMDVW

SEQ ID NO: 56935 - protein, 14 aa, Homo sapiens
CARSCIAAAGIDYW

SEQ ID NO: 56936 - protein, 15 aa, Homo sapiens
CARVVWVYGGNVDYW

SEQ ID NO: 56937 - protein, 17 aa, Homo sapiens
CARGSSDPAATDAFDIW

SEQ ID NO: 56938 - protein, 21 aa, Homo sapiens
CARDRLIGQWPVYYYYGMDVW

SEQ ID NO: 56939 - protein, 16 aa, Homo sapiens
CAKGIDGYNFKQFDYW

SEQ ID NO: 56940 - protein, 24 aa, Homo sapiens
CARDGRYYDYVWGSYHRNDAFDIW

SEQ ID NO: 56941 - protein, 14 aa, Homo sapiens
CAKRTFGSWAFDIW

SEQ ID NO: 56942 - protein, 14 aa, Homo sapiens
CAKGGSGRGESDYW

SEQ ID NO: 56943 - protein, 23 aa, Homo sapiens
CARLYDSSGYYDPLDPLDAFDIW

SEQ ID NO: 56944 - protein, 20 aa, Homo sapiens
CARGRPVTTFFKKRDWFDPW

SEQ ID NO: 56945 - protein, 23 aa, Homo sapiens
CARVLRQQLVGLGYYYYYGMDVW

SEQ ID NO: 56946 - protein, 22 aa, Homo sapiens
CARLAQYYDLSTGHYLYYFDNW

SEQ ID NO: 56947 - protein, 22 aa, Homo sapiens
CARDGGGYSYGSTGYYYGMDVW

SEQ ID NO: 56948 - protein, 17 aa, Homo sapiens
CARDNGYSYLKFQTDYW

SEQ ID NO: 56949 - protein, 20 aa, Homo sapiens
CAKDLPPYSSGWFESGFDYW

SEQ ID NO: 56950 - protein, 22 aa, Homo sapiens
CAGGEYSDGYGVRPVGNWFDPW

SEQ ID NO: 56951 - protein, 21 aa, Homo sapiens
CARLNYYGSGSYYRPYAFDIW

SEQ ID NO: 56952 - protein, 27 aa, Homo sapiens
CAHTVGWSSGWYWRAGGPTLSDAFDIW

SEQ ID NO: 56953 - protein, 24 aa, Homo sapiens
CARHASYQRSLFLVAVAEMDFDYW

SEQ ID NO: 56954 - protein, 20 aa, Homo sapiens
CAKVRLGYITGWLRTYFDYW

SEQ ID NO: 56955 - protein, 20 aa, Homo sapiens
CAREVPIQLWFFGTWGFDLW

SEQ ID NO: 56956 - protein, 25 aa, Homo sapiens
CASAFYGSGSYSSPIYYYYYGMDVW

SEQ ID NO: 56957 - protein, 24 aa, Homo sapiens
CARDLTGSRGAGGNYYYYYGMDVW

SEQ ID NO: 56958 - protein, 20 aa, Homo sapiens
CARGGWGQWSYYHYYGMDVW

SEQ ID NO: 56959 - protein, 21 aa, Homo sapiens
CARAPGISRWGIAAVAHFDYW

SEQ ID NO: 56960 - protein, 21 aa, Homo sapiens
CAKDISRYRSAATLPGGFDYW

SEQ ID NO: 56961 - protein, 18 aa, Homo sapiens
CARSPVTTTLYYYGMDVW

SEQ ID NO: 56962 - protein, 28 aa, Homo sapiens
CARSPKENYDILTGYYKESYYYYGMDVW

SEQ ID NO: 56963 - protein, 19 aa, Homo sapiens
CAKEGMVWPRIYYYGMDVW

SEQ ID NO: 56964 - protein, 23 aa, Homo sapiens
CARVQLGYCSSTSCYGMLRFDPW

SEQ ID NO: 56965 - protein, 18 aa, Homo sapiens
CARAKGGYGDWTYYFDYW

SEQ ID NO: 56966 - protein, 21 aa, Homo sapiens
CARAWGRITMVRGVATVFDYW

SEQ ID NO: 56967 - protein, 18 aa, Homo sapiens
CAKGLQQQLDFLDVFDIW

SEQ ID NO: 56968 - protein, 19 aa, Homo sapiens
CALPISAIYYCARDVLDYW

SEQ ID NO: 56969 - protein, 21 aa, Homo sapiens
CARDHPAYDILTGYYWYFDLW

SEQ ID NO: 56970 - protein, 20 aa, Homo sapiens
CAKDRVSYHESGDYYSFDTW

SEQ ID NO: 56971 - protein, 16 aa, Homo sapiens
CARSATVTANGLFDYW

SEQ ID NO: 56972 - protein, 13 aa, Homo sapiens
CAREREVGYYDNW

SEQ ID NO: 56973 - protein, 21 aa, Homo sapiens
CAKPGTPYYYGSGSYSTIDYW

SEQ ID NO: 56974 - protein, 27 aa, Homo sapiens
CARWGGPYYYDSSGYYYDYYYYGMDVW

SEQ ID NO: 56975 - protein, 22 aa, Homo sapiens
CARAVDVVVVGDVTGVGTFDIW

SEQ ID NO: 56976 - protein, 17 aa, Homo sapiens
CAKDSRAYDILTGWDYW

SEQ ID NO: 56977 - protein, 21 aa, Homo sapiens
CAKDRFTGGSGSYYNNGLDYW

SEQ ID NO: 56978 - protein, 22 aa, Homo sapiens
CARDLSDLGNMGVEYYYGMDVW

SEQ ID NO: 56979 - protein, 19 aa, Homo sapiens
CARDSGQLWYRDYYGMDVW

SEQ ID NO: 56980 - protein, 18 aa, Homo sapiens
CARGRHKLDSRWDWFHPW

SEQ ID NO: 56981 - protein, 21 aa, Homo sapiens
CARMEAQRGSSGWKSYYFDYW

SEQ ID NO: 56982 - protein, 23 aa, Homo sapiens
CARGGWRNTMIVVVGGGDAFDIW

SEQ ID NO: 56983 - protein, 20 aa, Homo sapiens
CAKGDRYFMLETNMVAFDSW

SEQ ID NO: 56984 - protein, 17 aa, Homo sapiens
CAREQDIAEGDDAFDIW

SEQ ID NO: 56985 - protein, 19 aa, Homo sapiens
CARGGWTTQLWHLTHFDYW

SEQ ID NO: 56986 - protein, 24 aa, Homo sapiens
CARVNHYDILTGFYNSITNWFDPW

SEQ ID NO: 56987 - protein, 20 aa, Homo sapiens
CASRERVCSSTSCYGGYDYW

SEQ ID NO: 56988 - protein, 16 aa, Homo sapiens
CATPNIAVAGLLTDYW

SEQ ID NO: 56989 - protein, 23 aa, Homo sapiens
CARDSPYYYDSSGPLAQVPFDYW

SEQ ID NO: 56990 - protein, 21 aa, Homo sapiens
CARDSSSSDYGDYIVSWFDPW

SEQ ID NO: 56991 - protein, 27 aa, Homo sapiens
CAKDSQLRYFDWLLLDTNYYYYGMDVW

SEQ ID NO: 56992 - protein, 20 aa, Homo sapiens
CATSFGYDSRGLQSDALDIW

SEQ ID NO: 56993 - protein, 18 aa, Homo sapiens
CRGYSGCRSCDYNSYDYW

SEQ ID NO: 56994 - protein, 17 aa, Homo sapiens
CARDRVTTVTTGWFDPW

SEQ ID NO: 56995 - protein, 20 aa, Homo sapiens
CARRGGGIPDYYYYYGMDVW

SEQ ID NO: 56996 - protein, 22 aa, Homo sapiens
CARDQGTWVQQQLVLEGAFDIW

SEQ ID NO: 56997 - protein, 21 aa, Homo sapiens
CARYVFMVGGIFIPDWYFDLW

SEQ ID NO: 56998 - protein, 20 aa, Homo sapiens
CARKQGGDFGKYYYDGMDVW

SEQ ID NO: 56999 - protein, 16 aa, Homo sapiens
CAKVRSGWQLSFFDPW

SEQ ID NO: 57000 - protein, 21 aa, Homo sapiens
CARVTDNYDIFGARVVWFDPW

SEQ ID NO: 57001 - protein, 17 aa, Homo sapiens
CARERTGSIWGWYFDLW

SEQ ID NO: 57002 - protein, 22 aa, Homo sapiens
CAHRRKLWGGYSGWRADYFDYW

SEQ ID NO: 57003 - protein, 16 aa, Homo sapiens
CARIQRDSGSYCFDYW

SEQ ID NO: 57004 - protein, 20 aa, Homo sapiens
CARHGRPHFPGYSYYGMDVW

SEQ ID NO: 57005 - protein, 26 aa, Homo sapiens
CARGGVVLRYFDWLPPQKKHNWFDPW

SEQ ID NO: 57006 - protein, 19 aa, Homo sapiens
CAKDWPYYGSEKGDYFDYW

SEQ ID NO: 57007 - protein, 18 aa, Homo sapiens
CAKVSLIRFGELSYYDYW

SEQ ID NO: 57008 - protein, 20 aa, Homo sapiens
CARRVGWYSYGSLQLQFDYW

SEQ ID NO: 57009 - protein, 23 aa, Homo sapiens
CARDPTSPTWFGELYYYYGMDVW

SEQ ID NO: 57010 - protein, 18 aa, Homo sapiens
CATLHYYDGRGYYPGDYW

SEQ ID NO: 57011 - protein, 24 aa, Homo sapiens
CARDLPRYLGRNRDMVRGVNDDYW

SEQ ID NO: 57012 - protein, 19 aa, Homo sapiens
CAASPLWFGELLPAPFDYW

SEQ ID NO: 57013 - protein, 18 aa, Homo sapiens
CAREYSSSWYWNGPFDYW

SEQ ID NO: 57014 - protein, 22 aa, Homo sapiens
CAKDTQYQLLSYDILTGYCDYW

SEQ ID NO: 57015 - protein, 21 aa, Homo sapiens
CAKRLDVLLWFGELFGSFDYW

SEQ ID NO: 57016 - protein, 17 aa, Homo sapiens
CTRPGESGYGIGAFDIW

SEQ ID NO: 57017 - protein, 16 aa, Homo sapiens
CAQLKAVAVSYYFDYW

SEQ ID NO: 57018 - protein, 17 aa, Homo sapiens
CAKARLMIVVDYAFDIW

SEQ ID NO: 57019 - protein, 23 aa, Homo sapiens
CARGRYSSSWYVRVGYYYGMDVW

SEQ ID NO: 57020 - protein, 15 aa, Homo sapiens
CATNSLSAAGHFDYW

SEQ ID NO: 57021 - protein, 19 aa, Homo sapiens
CTTDRYYDILTGYLIVDYW

SEQ ID NO: 57022 - protein, 18 aa, Homo sapiens
CAKDQNVYNIGTGAFDSW

SEQ ID NO: 57023 - protein, 18 aa, Homo sapiens
CARLSIAGSGYDYYFDYW

SEQ ID NO: 57024 - protein, 15 aa, Homo sapiens
CARDLLGSMYYFDYW

SEQ ID NO: 57025 - protein, 21 aa, Homo sapiens
CAKTAVSDKYSSSWYLYFDLW

SEQ ID NO: 57026 - protein, 21 aa, Homo sapiens
CARAASGDSWYEYYYYGMDVW

SEQ ID NO: 57027 - protein, 25 aa, Homo sapiens
CARDLMSGGWHWGPYYYYYYGMDVW

SEQ ID NO: 57028 - protein, 19 aa, Homo sapiens
CAGSMGVATYYYYYGMDVW

SEQ ID NO: 57029 - protein, 22 aa, Homo sapiens
CAKRERIPTGYSYGYGGVFGYW

SEQ ID NO: 57030 - protein, 16 aa, Homo sapiens
CVKDAFPTITGWFDPW

SEQ ID NO: 57031 - protein, 22 aa, Homo sapiens
CARTITYYYDSSGYYPAPFDYW

SEQ ID NO: 57032 - protein, 20 aa, Homo sapiens
CARYGYSSSWYGTLFYFQHW

SEQ ID NO: 57033 - protein, 20 aa, Homo sapiens
CARARSISVAGTWTYYFDYW

SEQ ID NO: 57034 - protein, 18 aa, Homo sapiens
CARGTIWFGELLYLPDYW

SEQ ID NO: 57035 - protein, 15 aa, Homo sapiens
CARDDQILRWSFDYW

SEQ ID NO: 57036 - protein, 20 aa, Homo sapiens
CAREFQPGYGDYSTDAFDIW

SEQ ID NO: 57037 - protein, 15 aa, Homo sapiens
CAKIPGFGESFPDYW

SEQ ID NO: 57038 - protein, 24 aa, Homo sapiens
CARSPASLLWFGELSPISNWFDPW

SEQ ID NO: 57039 - protein, 18 aa, Homo sapiens
CARRDRGASGSYYGFDYW

SEQ ID NO: 57040 - protein, 18 aa, Homo sapiens
CATTAVAGNWRGDAFDIW

SEQ ID NO: 57041 - protein, 24 aa, Homo sapiens
CARGGWLRGGPWANYYYYYGMDVW

SEQ ID NO: 57042 - protein, 23 aa, Homo sapiens
CARGRYSSSWYSNFRPNQEFDYW

SEQ ID NO: 57043 - protein, 20 aa, Homo sapiens
CARAVYTRGFTTAKYYFDYW

SEQ ID NO: 57044 - protein, 14 aa, Homo sapiens
CARSYSSTSLLDYW

SEQ ID NO: 57045 - protein, 20 aa, Homo sapiens
CAKDEGAGHNFYYYYGMDVW

SEQ ID NO: 57046 - protein, 17 aa, Homo sapiens
CAKDPKAAAGTGYFQHW

SEQ ID NO: 57047 - protein, 23 aa, Homo sapiens
CARNYYDSISYYLQDYYYGMDVW

SEQ ID NO: 57048 - protein, 19 aa, Homo sapiens
CARYYYDSSGYFFDGMDVW

SEQ ID NO: 57049 - protein, 19 aa, Homo sapiens
CAKGGPGGSGSYYNPFDYW

SEQ ID NO: 57050 - protein, 27 aa, Homo sapiens
CARHGPRRYYDILTGAKGYYYYGMDVW

SEQ ID NO: 57051 - protein, 16 aa, Homo sapiens
CAHSNAAAGMVYFDYW

SEQ ID NO: 57052 - protein, 26 aa, Homo sapiens
CARLSGYYDSSSISSLPFRPGAFDIW

SEQ ID NO: 57053 - protein, 23 aa, Homo sapiens
CARDSYYNSLTGYYAANDAFDFW

SEQ ID NO: 57054 - protein, 16 aa, Homo sapiens
CARTDTVMVTGDFDYW

SEQ ID NO: 57055 - protein, 21 aa, Homo sapiens
CAKDYYTVGATNYYYYGMDVW

SEQ ID NO: 57056 - protein, 18 aa, Homo sapiens
CARLYDSSGYYYPLFDYW

SEQ ID NO: 57057 - protein, 30 aa, Homo sapiens
CATDGAGRETMVRGVITYTSYYYYYGMDVW

SEQ ID NO: 57058 - protein, 19 aa, Homo sapiens
CARSYYDILTAYSRALDYW

SEQ ID NO: 57059 - protein, 17 aa, Homo sapiens
CTREVRILWFGASFDYW

SEQ ID NO: 57060 - protein, 15 aa, Homo sapiens
CARRGPENGYAFDYW

SEQ ID NO: 57061 - protein, 18 aa, Homo sapiens
CAKDTSRSWYDPGFLDYW

SEQ ID NO: 57062 - protein, 16 aa, Homo sapiens
CARSNGYSFYSAFDIW

SEQ ID NO: 57063 - protein, 16 aa, Homo sapiens
CAKSAFGGYSYGYDYW

SEQ ID NO: 57064 - protein, 14 aa, Homo sapiens
CAKFWGGGWFPDYW

SEQ ID NO: 57065 - protein, 17 aa, Homo sapiens
CARHRHMYGADPWFDPW

SEQ ID NO: 57066 - protein, 21 aa, Homo sapiens
CARSAPSPYGLGSWKTWFDPW

SEQ ID NO: 57067 - protein, 13 aa, Homo sapiens
CTHWTPVTTFDYW

SEQ ID NO: 57068 - protein, 17 aa, Homo sapiens
CATLIPHCSGGSCYDYW

SEQ ID NO: 57069 - protein, 17 aa, Homo sapiens
CASERNRRTYKGVFDYW

SEQ ID NO: 57070 - protein, 18 aa, Homo sapiens
CAREGEGSGWYDDYFDYW

SEQ ID NO: 57071 - protein, 23 aa, Homo sapiens
CARDQLRLGEFNGYYYYYGMDVW

SEQ ID NO: 57072 - protein, 22 aa, Homo sapiens
CARTTHYYDSSGYYLSYYFDYW

SEQ ID NO: 57073 - protein, 16 aa, Homo sapiens
CARVGWLQFQPLFDYW

SEQ ID NO: 57074 - protein, 19 aa, Homo sapiens
CAREAYYGSFQVGNWFDPW

SEQ ID NO: 57075 - protein, 17 aa, Homo sapiens
CAREVSRSWRDWYFDLW

SEQ ID NO: 57076 - protein, 20 aa, Homo sapiens
CARSHLTNYGDYLGDFFDLW

SEQ ID NO: 57077 - protein, 21 aa, Homo sapiens
CARDRHLTTVVPSYYYGMDVW

SEQ ID NO: 57078 - protein, 21 aa, Homo sapiens
CARVYYYDSSGYYEENAFDIW

SEQ ID NO: 57079 - protein, 13 aa, Homo sapiens
CASGRRIADIDYW

SEQ ID NO: 57080 - protein, 25 aa, Homo sapiens
CARDGYHSPLLWFGELFSHWYFDLW

SEQ ID NO: 57081 - protein, 13 aa, Homo sapiens
CVPLAVPGIVDYW

SEQ ID NO: 57082 - protein, 23 aa, Homo sapiens
CASSIAVAGGVGTYYYYYGMDVW

SEQ ID NO: 57083 - protein, 16 aa, Homo sapiens
CARDGRVGWEGWFDSW

SEQ ID NO: 57084 - protein, 16 aa, Homo sapiens
CARSYSGSFAVAFDIW

SEQ ID NO: 57085 - protein, 27 aa, Homo sapiens
CAREYYYGSGGPRGSFYYYYYYGMDVW

SEQ ID NO: 57086 - protein, 17 aa, Homo sapiens
CARDLPGGNGPYAFDIW

SEQ ID NO: 57087 - protein, 32 aa, Homo sapiens
CARAPLAPLADLWFGELLPHKFYYYYYGMDVW

SEQ ID NO: 57088 - protein, 20 aa, Homo sapiens
CARGLNLLYYYERSNWFDPW

SEQ ID NO: 57089 - protein, 17 aa, Homo sapiens
CAKDLGLRSRQYYFDYW

SEQ ID NO: 57090 - protein, 16 aa, Homo sapiens
CARDWAAASSGFIDYW

SEQ ID NO: 57091 - protein, 18 aa, Homo sapiens
CARQVRSSGTQIYHFDIW

SEQ ID NO: 57092 - protein, 17 aa, Homo sapiens
CAKSIQGGWYGNYFDYW

SEQ ID NO: 57093 - protein, 25 aa, Homo sapiens
CARDLLRYFDWATIWDYYYYGMDVW

SEQ ID NO: 57094 - protein, 17 aa, Homo sapiens
CARESGYNWNDGAFDVW

SEQ ID NO: 57095 - protein, 18 aa, Homo sapiens
CARAGYSYGSLEVWFDYW

SEQ ID NO: 57096 - protein, 19 aa, Homo sapiens
CARMVWFGGSGPTNWFDPW

SEQ ID NO: 57097 - protein, 17 aa, Homo sapiens
CAKWVSDLSLGVGIDYW

SEQ ID NO: 57098 - protein, 20 aa, Homo sapiens
CARGPAYSSGRYESLQLDYW

SEQ ID NO: 57099 - protein, 16 aa, Homo sapiens
CARGLITVTASAFDIW

SEQ ID NO: 57100 - protein, 21 aa, Homo sapiens
CAKDLYDNPTEGYYYYGMDVW

SEQ ID NO: 57101 - protein, 12 aa, Homo sapiens
CERASDDSADYW

SEQ ID NO: 57102 - protein, 18 aa, Homo sapiens
CATSRYYYDSSGYPFDYW

SEQ ID NO: 57103 - protein, 17 aa, Homo sapiens
CARNYIAAAGHDAFDIW

SEQ ID NO: 57104 - protein, 20 aa, Homo sapiens
CTSMYYDYVWGSYTNPIDYW

SEQ ID NO: 57105 - protein, 22 aa, Homo sapiens
CAKRGGSSWYRVLKNDYYFDYW

SEQ ID NO: 57106 - protein, 17 aa, Homo sapiens
CAKDKGHSGRSDAFDIW

SEQ ID NO: 57107 - protein, 24 aa, Homo sapiens
CARSPIGYSSGWYFQALEYYFDYW

SEQ ID NO: 57108 - protein, 18 aa, Homo sapiens
CARLARVMGSNWYYFDYW

SEQ ID NO: 57109 - protein, 13 aa, Homo sapiens
CQEFNGYPRVFSF

SEQ ID NO: 57110 - protein, 26 aa, Homo sapiens
CAKDQPTQDYYYDYVWGSYRYTGDYW

SEQ ID NO: 57111 - protein, 19 aa, Homo sapiens
CATVVGLTSVPPHWYFNVW

SEQ ID NO: 57112 - protein, 17 aa, Homo sapiens
CARNKRFGELLSWFDPW

SEQ ID NO: 57113 - protein, 22 aa, Homo sapiens
CARFSRWELRGGTYYYYGMDVW

SEQ ID NO: 57114 - protein, 17 aa, Homo sapiens
CASRPSYQLLNRAYDYW

SEQ ID NO: 57115 - protein, 18 aa, Homo sapiens
CASSYDYLWGRYRQFDSW

SEQ ID NO: 57116 - protein, 22 aa, Homo sapiens
CARDPTLIDDPQFYYYYGMDVW

SEQ ID NO: 57117 - protein, 16 aa, Homo sapiens
CAVGNVVAVTSFFDSW

SEQ ID NO: 57118 - protein, 17 aa, Homo sapiens
CAREPPTVTNFALFDYW

SEQ ID NO: 57119 - protein, 23 aa, Homo sapiens
CATGGPGVWFGEFTSPSKWFDPW

SEQ ID NO: 57120 - protein, 26 aa, Homo sapiens
CAREGRYFDWLLLAPNFEKNDAFDIW

SEQ ID NO: 57121 - protein, 18 aa, Homo sapiens
CGRSYCTLSGYCNWFGPW

SEQ ID NO: 57122 - protein, 23 aa, Homo sapiens
CARDRMITFGGVIVMSADAFDIW

SEQ ID NO: 57123 - protein, 13 aa, Homo sapiens
CLARVGDSGFDYW

SEQ ID NO: 57124 - protein, 17 aa, Homo sapiens
CAKDQGYFRPQYYFDYW

SEQ ID NO: 57125 - protein, 15 aa, Homo sapiens
CAHSGYSYVEPFDYW

SEQ ID NO: 57126 - protein, 17 aa, Homo sapiens
CARDQPPYSSSWSFDYW

SEQ ID NO: 57127 - protein, 14 aa, Homo sapiens
CAKEKGVSGCYDYW

SEQ ID NO: 57128 - protein, 16 aa, Homo sapiens
CARDLTYYHMAAFDIW

SEQ ID NO: 57129 - protein, 11 aa, Homo sapiens
CQQFRNYPRTF

SEQ ID NO: 57130 - protein, 16 aa, Homo sapiens
CAKPLSGSYYPDFDYW

SEQ ID NO: 57131 - protein, 21 aa, Homo sapiens
CARPGNYDSSGYYYDVAFDIW

SEQ ID NO: 57132 - protein, 17 aa, Homo sapiens
CARPLSIAAAGNLEDYW

SEQ ID NO: 57133 - protein, 23 aa, Homo sapiens
CARCVWDYDSSGYFPNHDAFDIW

SEQ ID NO: 57134 - protein, 24 aa, Homo sapiens
CARELTGITMVRGVLGGHSAFDIW

SEQ ID NO: 57135 - protein, 20 aa, Homo sapiens
CARLAPRGFYGLVDYYFDYW

SEQ ID NO: 57136 - protein, 15 aa, Homo sapiens
CAWIGGYTSGWTDYW

SEQ ID NO: 57137 - protein, 26 aa, Homo sapiens
CANNEGYCSSTSCRTINYYYYGMDVW

SEQ ID NO: 57138 - protein, 17 aa, Homo sapiens
CARTNIAVISADAFDIW

SEQ ID NO: 57139 - protein, 16 aa, Homo sapiens
CATDRPYSGSYLFDYW

SEQ ID NO: 57140 - protein, 15 aa, Homo sapiens
CARGMTVAGNYMDVW

SEQ ID NO: 57141 - protein, 15 aa, Homo sapiens
CAKVSSQWELLPDYW

SEQ ID NO: 57142 - protein, 15 aa, Homo sapiens
CAHRSSYYHNYFDYW

SEQ ID NO: 57143 - protein, 15 aa, Homo sapiens
CARRMYGGNLAWDYW

SEQ ID NO: 57144 - protein, 24 aa, Homo sapiens
CATAPHVDTAMVTWGYYYYGMDVW

SEQ ID NO: 57145 - protein, 25 aa, Homo sapiens
CARHLGITMVRGVIISSDHDAFDIW

SEQ ID NO: 57146 - protein, 23 aa, Homo sapiens
CAKDGDLGIWFGELLSPYYFDYW

SEQ ID NO: 57147 - protein, 19 aa, Homo sapiens
CARGGELRAPVTGAYFDYW

SEQ ID NO: 57148 - protein, 22 aa, Homo sapiens
CASDYYGSGSYYNGDLNWFDPW

SEQ ID NO: 57149 - protein, 19 aa, Homo sapiens
CAKDVAWLLITDPYYFDYW

SEQ ID NO: 57150 - protein, 19 aa, Homo sapiens
CARENVDYEGYHYYGMDVW

SEQ ID NO: 57151 - protein, 18 aa, Homo sapiens
CAHRGGLSSSWVNWFDPW

SEQ ID NO: 57152 - protein, 18 aa, Homo sapiens
CATDRRGYSYGSWYFDLW

SEQ ID NO: 57153 - protein, 25 aa, Homo sapiens
CAKVNMPFTSGSYRRGYYYYAMDVW

SEQ ID NO: 57154 - protein, 17 aa, Homo sapiens
CAREGGSSRGVEAFDIW

SEQ ID NO: 57155 - protein, 24 aa, Homo sapiens
CCTRMTHYYEDSNESPINWYFDLW

SEQ ID NO: 57156 - protein, 19 aa, Homo sapiens
CARQIWFGELLGGWYFDLW

SEQ ID NO: 57157 - protein, 18 aa, Homo sapiens
CVLKLWFGEPHLRYFDYW

SEQ ID NO: 57158 - protein, 27 aa, Homo sapiens
CARDLDYYDSSGSDELRIYYYYGMDVW

SEQ ID NO: 57159 - protein, 24 aa, Homo sapiens
CARDCRSLNSLMTTVTTGCAFDIW

SEQ ID NO: 57160 - protein, 17 aa, Homo sapiens
CARYRLTYSSGWYSDYW

SEQ ID NO: 57161 - protein, 27 aa, Homo sapiens
CAKVRLSCSGGACYSEGVGALRGIDYW

SEQ ID NO: 57162 - protein, 22 aa, Homo sapiens
CAKDGGVGQWLAHYYYYGMDVW

SEQ ID NO: 57163 - protein, 21 aa, Homo sapiens
CAKVRGHIVVVPAEMYYFDYW

SEQ ID NO: 57164 - protein, 17 aa, Homo sapiens
CATLPGGLTGDSPRDYW

SEQ ID NO: 57165 - protein, 20 aa, Homo sapiens
CARQGTYDILSVGSREFDYW

SEQ ID NO: 57166 - protein, 15 aa, Homo sapiens
CATLKGYKWNAFDIW

SEQ ID NO: 57167 - protein, 23 aa, Homo sapiens
CARGPGDYLDGPGIVFLQYFQHW

SEQ ID NO: 57168 - protein, 16 aa, Homo sapiens
CAHRKLLISGGWFDPW

SEQ ID NO: 57169 - protein, 22 aa, Homo sapiens
CARGNLVAGPQDYYYYYGMDVW

SEQ ID NO: 57170 - protein, 23 aa, Homo sapiens
CARQLRYFDWLLYSDPGYYFDYW

SEQ ID NO: 57171 - protein, 16 aa, Homo sapiens
CATQGPWFGEFPVDYW

SEQ ID NO: 57172 - protein, 20 aa, Homo sapiens
CAREDDSGSYYHYFYGMDVW

SEQ ID NO: 57173 - protein, 22 aa, Homo sapiens
CARVSARCSSTSCTKGYYFDYW

SEQ ID NO: 57174 - protein, 15 aa, Homo sapiens [sequence omitted]

SEQ ID NO: 57175 - protein, 11 aa, Homo sapiens [sequence omitted]

SEQ ID NO: 57176 - protein, 20 aa, Homo sapiens
CTRGLQRSVYTYGADAFDIW

SEQ ID NO: 57177 - protein, 25 aa, Homo sapiens
CTRDLFGSYDILTGYYKGVDAFDIW

SEQ ID NO: 57178 - protein, 16 aa, Homo sapiens
CAKDRLFWAVAGFDYW

SEQ ID NO: 57179 - protein, 17 aa, Homo sapiens
CARHRRAVVHQYYFDYW

SEQ ID NO: 57180 - protein, 14 aa, Homo sapiens
CASLSITMVPFDYW

SEQ ID NO: 57181 - protein, 21 aa, Homo sapiens
CTRHEEDIWFGESYTRNFDYW

SEQ ID NO: 57182 - protein, 18 aa, Homo sapiens
CARDSPYYDYVWGTPDYW

SEQ ID NO: 57183 - protein, 19 aa, Homo sapiens
CARDYRDYIWKSSRYHDYW

SEQ ID NO: 57184 - protein, 19 aa, Homo sapiens
CAKDLYYSGYYPKYYFDYW

SEQ ID NO: 57185 - protein, 23 aa, Homo sapiens
CATASSITGTILYYYYYYGMDVW

SEQ ID NO: 57186 - protein, 21 aa, Homo sapiens
CASGGYSSSWEKYYYYGMDVW

SEQ ID NO: 57187 - protein, 19 aa, Homo sapiens
CVKVLGGNSYAGVWYFDAW

SEQ ID NO: 57188 - protein, 19 aa, Homo sapiens
CARLTSSSWYPPSYYFDYW

SEQ ID NO: 57189 - protein, 11 aa, Homo sapiens
CLRDYNYLFIF

SEQ ID NO: 57190 - protein, 22 aa, Homo sapiens
CARVVAVAGSDDYYYYYGMDVW

SEQ ID NO: 57191 - protein, 21 aa, Homo sapiens
CAKEEYGDYVVVGYSGAFDIW

SEQ ID NO: 57192 - protein, 18 aa, Homo sapiens
CTRDFFSRGGSGFYYVYW

SEQ ID NO: 57193 - protein, 17 aa, Homo sapiens
CTVDPYYDILTGSGDYW

SEQ ID NO: 57194 - protein, 20 aa, Homo sapiens
CARGGGQQLVWSHDDAFDIW

SEQ ID NO: 57195 - protein, 14 aa, Homo sapiens
CAKVHYGGNSFDYW

SEQ ID NO: 57196 - protein, 26 aa, Homo sapiens
CATATGRIAAAGTPPYYYYYYGMDVW

SEQ ID NO: 57197 - protein, 27 aa, Homo sapiens
CARDRHSRFYYGSGSYYNGYYYGMDVW

SEQ ID NO: 57198 - protein, 16 aa, Homo sapiens
CAREHSPVAGLGFDPW

SEQ ID NO: 57199 - protein, 19 aa, Homo sapiens
CARGEGDFWSGYPYSFEYW

SEQ ID NO: 57200 - protein, 16 aa, Homo sapiens
CAKDERLYGASWFDSW

SEQ ID NO: 57201 - protein, 19 aa, Homo sapiens
CARASRRWLQLLHGWFDPW

SEQ ID NO: 57202 - protein, 21 aa, Homo sapiens
CARGGWSSGYYFLSGDWFDPW

SEQ ID NO: 57203 - protein, 17 aa, Homo sapiens
CARFWVGGYDHGYFDYW

SEQ ID NO: 57204 - protein, 21 aa, Homo sapiens
CVKEPTLAAPVGPDPNWFDPW

SEQ ID NO: 57205 - protein, 16 aa, Homo sapiens
CATGPAVAGTNWFDPW

SEQ ID NO: 57206 - protein, 16 aa, Homo sapiens
CAKRWGASGYDLADYW

SEQ ID NO: 57207 - protein, 21 aa, Homo sapiens
CTTEKRDFSGYYFDDYYFDYW

SEQ ID NO: 57208 - protein, 16 aa, Homo sapiens
CAKELRSGSDPYFDYW

SEQ ID NO: 57209 - protein, 10 aa, Homo sapiens
CATDLFFRYW

SEQ ID NO: 57210 - protein, 16 aa, Homo sapiens
CAREGLSDTALNFDYW

SEQ ID NO: 57211 - protein, 25 aa, Homo sapiens
CTTGYNSVLRYFDWRGYYYYGMDVW

SEQ ID NO: 57212 - protein, 17 aa, Homo sapiens
CARLDSGEAWYNWFDPW

SEQ ID NO: 57213 - protein, 25 aa, Homo sapiens
CARTSWAMATFAIQSRYYYYGMDVW

SEQ ID NO: 57214 - protein, 19 aa, Homo sapiens
CARVRRGDYRGNSDTLDYW

SEQ ID NO: 57215 - protein, 15 aa, Homo sapiens
CARISVIGAVAKDYW

SEQ ID NO: 57216 - protein, 18 aa, Homo sapiens
CARAHFYYLRGGYYFDYW

SEQ ID NO: 57217 - protein, 21 aa, Homo sapiens
CATLGFIAAAGISYYYGMDVW

SEQ ID NO: 57218 - protein, 22 aa, Homo sapiens
CAKSPVELLWFGELIGVYFDYW

SEQ ID NO: 57219 - protein, 19 aa, Homo sapiens
CTTAHRWLLGFPLSYFDYW

SEQ ID NO: 57220 - protein, 21 aa, Homo sapiens
CAILGEPEYGYNAEGGIFDYW

SEQ ID NO: 57221 - protein, 11 aa, Homo sapiens
CLSGDEDTWVF

SEQ ID NO: 57222 - protein, 24 aa, Homo sapiens
CARWLPGGSSSWYHYYYYYGMDVW

SEQ ID NO: 57223 - protein, 23 aa, Homo sapiens
CARDSSTVTTWDDYYYYYGMDVW

SEQ ID NO: 57224 - protein, 23 aa, Homo sapiens
CARDRVDIVATITGYYYYGMDVW

SEQ ID NO: 57225 - protein, 15 aa, Homo sapiens
CAHRSSWLQNWFDPW

SEQ ID NO: 57226 - protein, 22 aa, Homo sapiens
CARSQRLLWFGEPTNDWYFDLW

SEQ ID NO: 57227 - protein, 15 aa, Homo sapiens
CAASGSYSTPRLDYW

SEQ ID NO: 57228 - protein, 22 aa, Homo sapiens
CARGPNPSTTVVTPWKNAFDIW

SEQ ID NO: 57229 - protein, 20 aa, Homo sapiens
CARHDCPGGSCFYYYGMDVW

SEQ ID NO: 57230 - protein, 25 aa, Homo sapiens
CARTAYSFGWYYTHWTQKSGYFDSW

SEQ ID NO: 57231 - protein, 23 aa, Homo sapiens
CATDHRGGSGSPWGYYYYGMDVW

SEQ ID NO: 57232 - protein, 23 aa, Homo sapiens
CARDEPPNYYDSSGYYLGELDYW

SEQ ID NO: 57233 - protein, 16 aa, Homo sapiens
CASLVRGAYWGWFDPW

SEQ ID NO: 57234 - protein, 23 aa, Homo sapiens
CAGTHSPYSYGYNSNPRDAVDIW

SEQ ID NO: 57235 - protein, 18 aa, Homo sapiens
CASTPGIAAAPSYYFDYW

SEQ ID NO: 57236 - protein, 13 aa, Homo sapiens
CAGRSALGDFDYW

SEQ ID NO: 57237 - protein, 12 aa, Homo sapiens
CHTAGVGPSDYW

SEQ ID NO: 57238 - protein, 21 aa, Homo sapiens
CATTLGDSSGYYRPPFYFDYW

SEQ ID NO: 57239 - protein, 27 aa, Homo sapiens
CARYHCSSTSCYKDSQAYYYYYGMDVW

SEQ ID NO: 57240 - protein, 20 aa, Homo sapiens
CARRYCSGGSCYSSWYFDLW

SEQ ID NO: 57241 - protein, 17 aa, Homo sapiens
CARDTRYSYGYWNFDYW

SEQ ID NO: 57242 - protein, 22 aa, Homo sapiens
CARIGPPGLRYFDWAYNWFDPW

SEQ ID NO: 57243 - protein, 21 aa, Homo sapiens
CARRTVDYDILTGYLYYFDYW

SEQ ID NO: 57244 - protein, 24 aa, Homo sapiens
CTTDYVLRYFDWLLYPPRDAFDIW

SEQ ID NO: 57245 - protein, 19 aa, Homo sapiens
CAKDNSRWPLPTDWYFDLW

SEQ ID NO: 57246 - protein, 22 aa, Homo sapiens
CAKDPLHLHSQQWLVEYYFDYW

SEQ ID NO: 57247 - protein, 13 aa, Homo sapiens
CARGPRSYYLDYW

SEQ ID NO: 57248 - protein, 21 aa, Homo sapiens
CARLRNRWDSDIVVVPAPDYW

SEQ ID NO: 57249 - protein, 18 aa, Homo sapiens
CARGYCNTGSCYKGLDYW

SEQ ID NO: 57250 - protein, 18 aa, Homo sapiens
CAHRGYSGYGFGLSFDYW

SEQ ID NO: 57251 - protein, 24 aa, Homo sapiens
CARETTPYYYGSGSYYTVGYFDYW

SEQ ID NO: 57252 - protein, 33 aa, Homo sapiens
CLRAGDTAVYYCARVEYYYDSSGYPYYWYFDLW

SEQ ID NO: 57253 - protein, 26 aa, Homo sapiens
CAKSLMGSLSDVLGEFDYYYYGMDVW

SEQ ID NO: 57254 - protein, 21 aa, Homo sapiens
CARDRGGAVAENYYYYGMDVW

SEQ ID NO: 57255 - protein, 16 aa, Homo sapiens
CARRLHRDGYNSLDYW

SEQ ID NO: 57256 - protein, 16 aa, Homo sapiens
CARRPLTTGSDSFDIW

SEQ ID NO: 57257 - protein, 19 aa, Homo sapiens
CARVIVVVTALILEYFDYW

SEQ ID NO: 57258 - protein, 21 aa, Homo sapiens
CARGGWFRRAIESGDWYFDLW

SEQ ID NO: 57259 - protein, 14 aa, Homo sapiens
CAHRKVFGGYLDYW

SEQ ID NO: 57260 - protein, 18 aa, Homo sapiens
CAKDIYGGNMPGDAFDIW

SEQ ID NO: 57261 - protein, 28 aa, Homo sapiens
CARDRLQNVNSSGYYPHPYYYYYGMDVW

SEQ ID NO: 57262 - protein, 22 aa, Homo sapiens
CARDGGQVTGTYIYYYYGMDVW

SEQ ID NO: 57263 - protein, 24 aa, Homo sapiens
CAKDLLGAVVGYGGNPWPVVFDYW

SEQ ID NO: 57264 - protein, 15 aa, Homo sapiens
CARMRSGSGMGLDYW

SEQ ID NO: 57265 - protein, 22 aa, Homo sapiens
CTTDFVAITDYGDYGGSAFDIW

SEQ ID NO: 57266 - protein, 14 aa, Homo sapiens
CAHRNGWYWYFDLW

SEQ ID NO: 57267 - protein, 20 aa, Homo sapiens
CTRGGDCTGGSCYGALFDFW

SEQ ID NO: 57268 - protein, 20 aa, Homo sapiens
CAQTPSSWPHSIYYYGMDVW

SEQ ID NO: 57269 - protein, 19 aa, Homo sapiens
CAREGGGGYSGYENPFDYW

SEQ ID NO: 57270 - protein, 22 aa, Homo sapiens
CARLPPPFHPYSSSWFYYFDYW

SEQ ID NO: 57271 - protein, 19 aa, Homo sapiens
CARVPLWFGELEENWFDPW

SEQ ID NO: 57272 - protein, 14 aa, Homo sapiens
CARGLQWLVAFDIW

SEQ ID NO: 57273 - protein, 21 aa, Homo sapiens
CARVRSSGWNYYYYYYGMDVW

SEQ ID NO: 57274 - protein, 19 aa, Homo sapiens
CARVTEWQQRNHYYGLDYW

SEQ ID NO: 57275 - protein, 16 aa, Homo sapiens
CAKDGYDGSWGFFDSW

SEQ ID NO: 57276 - protein, 22 aa, Homo sapiens
CARGGWGRGLPKAGYYYGMDVW

SEQ ID NO: 57277 - protein, 22 aa, Homo sapiens
CATRIAVAGLGGAFYYYGMDVW

SEQ ID NO: 57278 - protein, 18 aa, Homo sapiens
CAHSSVAALNWRGRFDPW

SEQ ID NO: 57279 - protein, 19 aa, Homo sapiens
CATFGSGCSGGSCYDYDYW

SEQ ID NO: 57280 - protein, 25 aa, Homo sapiens
CATKVLRYFDWLLQSGAPQGWFDPW

SEQ ID NO: 57281 - protein, 17 aa, Homo sapiens
CASHETGYYRDDAFDIW

SEQ ID NO: 57282 - protein, 18 aa, Homo sapiens
CARGGYSSWYDLNWFDPW

SEQ ID NO: 57283 - protein, 16 aa, Homo sapiens
CAKGLVYSRGWGFDYW

SEQ ID NO: 57284 - protein, 20 aa, Homo sapiens
CARADYYGSGSYYNLVIDYW

SEQ ID NO: 57285 - protein, 19 aa, Homo sapiens
CAKDRTPIVAAANDAFDFW

SEQ ID NO: 57286 - protein, 24 aa, Homo sapiens
CARQQGIWYYYDSSGYRNWYFDLW

SEQ ID NO: 57287 - protein, 20 aa, Homo sapiens
CARRPDRWLQLAGAYYFDYW

SEQ ID NO: 57288 - protein, 22 aa, Homo sapiens
CTSPTPSDYYGSGKYYYGMDVW

SEQ ID NO: 57289 - protein, 21 aa, Homo sapiens
CVRNSYGSGPGLRANNWFDPW

SEQ ID NO: 57290 - protein, 21 aa, Homo sapiens
CARASPPDSSGYYYGYYFDYW

SEQ ID NO: 57291 - protein, 17 aa, Homo sapiens
CARTMVSGWYQYYFDYW

SEQ ID NO: 57292 - protein, 20 aa, Homo sapiens
CARDSVAGTVEGLFYWFDPW

SEQ ID NO: 57293 - protein, 16 aa, Homo sapiens
CATVTYGSGHWYFDLW

SEQ ID NO: 57294 - protein, 24 aa, Homo sapiens
CARDLSVGNDSSGYHYYYYGMDVW

SEQ ID NO: 57295 - protein, 19 aa, Homo sapiens
CAKGGYFDWLFNRDPLDYW

SEQ ID NO: 57296 - protein, 19 aa, Homo sapiens
CAKEVYSSSWYPVLLEDYW

SEQ ID NO: 57297 - protein, 21 aa, Homo sapiens
CARGDSGYAKYVSQPYYFDYW

SEQ ID NO: 57298 - protein, 15 aa, Homo sapiens
CARGGDGTGTSFDYW

SEQ ID NO: 57299 - protein, 18 aa, Homo sapiens
CAGNYDSSGYYFGWFDPW

SEQ ID NO: 57300 - protein, 20 aa, Homo sapiens
CARPVSSSWHKAEGYYFDYW

SEQ ID NO: 57301 - protein, 23 aa, Homo sapiens
CAHSFIGLYYDSSGYILGAFDIW

SEQ ID NO: 57302 - protein, 16 aa, Homo sapiens
CAREGMTTVTTGLDYW

SEQ ID NO: 57303 - protein, 17 aa, Homo sapiens
CARDGELWELGLPVDYW

SEQ ID NO: 57304 - protein, 21 aa, Homo sapiens
CVRDSYDSSGSDGTFYGFDLW

SEQ ID NO: 57305 - protein, 15 aa, Homo sapiens
CARSKYDLRDPFDLW

SEQ ID NO: 57306 - protein, 16 aa, Homo sapiens
CARVDYTSGTDIFDYW

SEQ ID NO: 57307 - protein, 21 aa, Homo sapiens
CARVRTTVVTTRYYYYGMDVW

SEQ ID NO: 57308 - protein, 18 aa, Homo sapiens
CARAEGSWYGSTRAFEYW

SEQ ID NO: 57309 - protein, 26 aa, Homo sapiens
CARERGVIISPHRVGSNYYYYGMDVW

SEQ ID NO: 57310 - protein, 18 aa, Homo sapiens
CARHKKVTTVSSLDFDYW

SEQ ID NO: 57311 - protein, 20 aa, Homo sapiens
CVRVSFNVGWSVSGGGFDPW

SEQ ID NO: 57312 - protein, 21 aa, Homo sapiens
CAREMSRYYDTSGWEYYFDSW

SEQ ID NO: 57313 - protein, 21 aa, Homo sapiens
CARGVVVVVASEDYYYGMDVW

SEQ ID NO: 57314 - protein, 19 aa, Homo sapiens
CAKKAEMATIMVVGYLDYW

SEQ ID NO: 57315 - protein, 17 aa, Homo sapiens
CASLSLGIVGEWLYDYW

SEQ ID NO: 57316 - protein, 16 aa, Homo sapiens
CAHRRCCYEAPYFDYW

SEQ ID NO: 57317 - protein, 24 aa, Homo sapiens
CARGAYSSSWYYLVTAIPYYFDYW

SEQ ID NO: 57318 - protein, 20 aa, Homo sapiens
CARGEYSSGWYGRRARFDPW

SEQ ID NO: 57319 - protein, 18 aa, Homo sapiens
CARRSYGSGSSLVDFDYW

SEQ ID NO: 57320 - protein, 17 aa, Homo sapiens
CARDVTSDWNDLGFDYW

SEQ ID NO: 57321 - protein, 17 aa, Homo sapiens
CARGRGLEGSYYSFDIW

SEQ ID NO: 57322 - protein, 21 aa, Homo sapiens
CARAQRRITMVRGGLYYFDYW

SEQ ID NO: 57323 - protein, 21 aa, Homo sapiens
CARAVLNVAADGSGVECFDYW

SEQ ID NO: 57324 - protein, 18 aa, Homo sapiens
CARDAALIAVAVNWFDPW

SEQ ID NO: 57325 - protein, 15 aa, Homo sapiens
CAGHSSWLRGHFDYW

SEQ ID NO: 57326 - protein, 16 aa, Homo sapiens
CARIEAAAAGTYFDYW

SEQ ID NO: 57327 - protein, 20 aa, Homo sapiens
CARSYCSSTSCYAGPLFDYW

SEQ ID NO: 57328 - protein, 22 aa, Homo sapiens
CARATYYCSGGSCYRFGQIDYW

SEQ ID NO: 57329 - protein, 22 aa, Homo sapiens
CAKDRRDCSSTSCWGFGWFDPW

SEQ ID NO: 57330 - protein, 21 aa, Homo sapiens
CARTYYYDSSGYYYQYYFDYW

SEQ ID NO: 57331 - protein, 11 aa, Homo sapiens
CATIGDYVDYW

SEQ ID NO: 57332 - protein, 25 aa, Homo sapiens
CARHSHITMVRGVIIADYYYGMDVW

SEQ ID NO: 57333 - protein, 21 aa, Homo sapiens
CARSPASIVVVPAAAYYFDYW

SEQ ID NO: 57334 - protein, 11 aa, Homo sapiens
CLRHNTYPLAF

SEQ ID NO: 57335 - protein, 18 aa, Homo sapiens
CARLRRDDYGDFYYFDPW

SEQ ID NO: 57336 - protein, 12 aa, Homo sapiens
CARTWLTLFDYW

SEQ ID NO: 57337 - protein, 21 aa, Homo sapiens
CARGGWSSSWYLGGFNWFDPW

SEQ ID NO: 57338 - protein, 17 aa, Homo sapiens
CAKDPQWEPPFTGFDYW

SEQ ID NO: 57339 - protein, 16 aa, Homo sapiens
CARRITVIVYDALDMW

SEQ ID NO: 57340 - protein, 16 aa, Homo sapiens
CARAATAIPFIAFDIW

SEQ ID NO: 57341 - protein, 21 aa, Homo sapiens
CARVFNYDILTGYFSGAFDIW

SEQ ID NO: 57342 - protein, 17 aa, Homo sapiens
CAKAGKTYSLTDWFDPW

SEQ ID NO: 57343 - protein, 23 aa, Homo sapiens
CTRRGPTLDFFDWYQDRTGFDPW

SEQ ID NO: 57344 - protein, 24 aa, Homo sapiens
CARDPLGGFRGQLVLIMGYYFDYW

SEQ ID NO: 57345 - protein, 11 aa, Homo sapiens
CVQDYSFPYTF

SEQ ID NO: 57346 - protein, 22 aa, Homo sapiens
CARGDVDTAMVKWYYYYGMDVW

SEQ ID NO: 57347 - protein, 16 aa, Homo sapiens
CAKEVYVCCGWPFDYW

SEQ ID NO: 57348 - protein, 15 aa, Homo sapiens
CAGRVAEAGIGFRYW

SEQ ID NO: 57349 - protein, 20 aa, Homo sapiens
CAREPRGWLQLRNHYYFDYW

SEQ ID NO: 57350 - protein, 24 aa, Homo sapiens
CAHSIAAAAEGEDYYYYYYGMDVW

SEQ ID NO: 57351 - protein, 20 aa, Homo sapiens
CATSRSHYYDSSGYYSLDYW

SEQ ID NO: 57352 - protein, 22 aa, Homo sapiens
CTSRIWFGESTTNYYYYGMDVW

SEQ ID NO: 57353 - protein, 18 aa, Homo sapiens
CARSGEYSSGWYQEFDFW

SEQ ID NO: 57354 - protein, 13 aa, Homo sapiens
CGIWDGSLSAELF

SEQ ID NO: 57355 - protein, 13 aa, Homo sapiens
CAAGGTTGELDYW

SEQ ID NO: 57356 - protein, 15 aa, Homo sapiens
CTQTSSGWYFFFDSW

SEQ ID NO: 57357 - protein, 19 aa, Homo sapiens
CARRAFRSMDWAVAHFDYW

SEQ ID NO: 57358 - protein, 21 aa, Homo sapiens
CARDPTNRKRSDGYNYRIDYW

SEQ ID NO: 57359 - protein, 17 aa, Homo sapiens
CVGDGSGTYYGYYFDYW

SEQ ID NO: 57360 - protein, 15 aa, Homo sapiens
CAKMDCRGECYFDYW

SEQ ID NO: 57361 - protein, 16 aa, Homo sapiens
CARVGMLWLNRWFDPW

SEQ ID NO: 57362 - protein, 21 aa, Homo sapiens
CARDCTDTSCRDCCYDAFDIW

SEQ ID NO: 57363 - protein, 23 aa, Homo sapiens
CARHFGPGYSSSWYLGGDAFDIW

SEQ ID NO: 57364 - protein, 13 aa, Homo sapiens
CAHSSPLFTFDYW

SEQ ID NO: 57365 - protein, 17 aa, Homo sapiens
CAKDRDIVVVTGTPDYW

SEQ ID NO: 57366 - protein, 23 aa, Homo sapiens
CARTPKSLRILWFGELNDAFDIW

SEQ ID NO: 57367 - protein, 26 aa, Homo sapiens
CAKSIWGTYYYDSSGYYRGPNWFDPW

SEQ ID NO: 57368 - protein, 26 aa, Homo sapiens
CARGAGSYYSSGSYYDLYYYYGMDVW

SEQ ID NO: 57369 - protein, 19 aa, Homo sapiens
CAKDSRASPYIAAAGIDYW

SEQ ID NO: 57370 - protein, 19 aa, Homo sapiens
CARIVAVAGIDDLGWFDPW

SEQ ID NO: 57371 - protein, 19 aa, Homo sapiens
CARSHYDILTGYQDVFEYW

SEQ ID NO: 57372 - protein, 24 aa, Homo sapiens
CARIDATPNLMVRGVIISYYFDYW

SEQ ID NO: 57373 - protein, 13 aa, Homo sapiens
CAHMLPLTGLDYW

SEQ ID NO: 57374 - protein, 21 aa, Homo sapiens
CAKPSRPYCSGGSCYRYFDYW

SEQ ID NO: 57375 - protein, 27 aa, Homo sapiens
CARDPNPDVDIVATLGGSYYYYGMDVW

SEQ ID NO: 57376 - protein, 20 aa, Homo sapiens
CARSASENGWYYYYYGMDVW

SEQ ID NO: 57377 - protein, 22 aa, Homo sapiens
CARDAVVTPRFAEYYYYGMDVW

SEQ ID NO: 57378 - protein, 21 aa, Homo sapiens
CARGMDVLVEAVASPYTFDIW

SEQ ID NO: 57379 - protein, 20 aa, Homo sapiens
CAHWGGRRWLQFGGPYFDYW

SEQ ID NO: 57380 - protein, 15 aa, Homo sapiens
CAEIVGAVGDAFDIW

SEQ ID NO: 57381 - protein, 18 aa, Homo sapiens
CARDWPLVGFVTTWFDPW

SEQ ID NO: 57382 - protein, 18 aa, Homo sapiens
CARDQDYGDDYYYGMDVW

SEQ ID NO: 57383 - protein, 20 aa, Homo sapiens
CATGSPIAVAGTRGNWFDPW

SEQ ID NO: 57384 - protein, 15 aa, Homo sapiens
CARVTVYSSSWFDPW

SEQ ID NO: 57385 - protein, 18 aa, Homo sapiens
CARGLSDSWHRTYYFDFW

SEQ ID NO: 57386 - protein, 18 aa, Homo sapiens
CARDVFNGYSGYAYLDHW

SEQ ID NO: 57387 - protein, 16 aa, Homo sapiens
CALLGYGGNSGHADYW

SEQ ID NO: 57388 - protein, 22 aa, Homo sapiens
CAKDIGAMVRGVIITHDAFDIW

SEQ ID NO: 57389 - protein, 17 aa, Homo sapiens
CARHLTGYSVNEPFDFW

SEQ ID NO: 57390 - protein, 20 aa, Homo sapiens
CASTNYYGSGSYYNGYFDYW

SEQ ID NO: 57391 - protein, 23 aa, Homo sapiens
CAKDLEVGATRNDYYYYYGMDVW

SEQ ID NO: 57392 - protein, 18 aa, Homo sapiens
CARDSSGWVWNLNWFDPW

SEQ ID NO: 57393 - protein, 16 aa, Homo sapiens
CARGYRDFSYWFFDLW

SEQ ID NO: 57394 - protein, 16 aa, Homo sapiens
CARPHSGSYYAEVDYW

SEQ ID NO: 57395 - protein, 18 aa, Homo sapiens
CVKVKTENGWELHGFDSW

SEQ ID NO: 57396 - protein, 21 aa, Homo sapiens
CARVEYYYDSSGYYSHYFDYW

SEQ ID NO: 57397 - protein, 17 aa, Homo sapiens
CARDPSHNTGDSYFDSW

SEQ ID NO: 57398 - protein, 23 aa, Homo sapiens
CARSPLVRVYQLLLYYYYGMDVW

SEQ ID NO: 57399 - protein, 16 aa, Homo sapiens
CARDMSSGYFPTLDYW

SEQ ID NO: 57400 - protein, 18 aa, Homo sapiens
CAKDPLYSGYGLRSFDYW

SEQ ID NO: 57401 - protein, 19 aa, Homo sapiens
CASDFFPHYYGSGSPFDYW

SEQ ID NO: 57402 - protein, 12 aa, Homo sapiens [sequence omitted]

SEQ ID NO: 57403 - protein, 16 aa, Homo sapiens
CARGDYHGSGAHADYW

SEQ ID NO: 57404 - protein, 17 aa, Homo sapiens
CARDAIVVVTAGYFDLW

SEQ ID NO: 57405 - protein, 23 aa, Homo sapiens
CARVQPRLLWFGEPPYDYYFDYW

SEQ ID NO: 57406 - protein, 18 aa, Homo sapiens
CATGGSGWYSDYYGMDVW

SEQ ID NO: 57407 - protein, 17 aa, Homo sapiens
CARDLSGAAGESWFDPW

SEQ ID NO: 57408 - protein, 22 aa, Homo sapiens
CARTVVPAAMWILYSYYGMDVW

SEQ ID NO: 57409 - protein, 25 aa, Homo sapiens
CARDGPRYNWNDFWVDRTTNWFDPW

SEQ ID NO: 57410 - protein, 26 aa, Homo sapiens
CARHPLRGYSYGYRGYDSSGYEFDYW

SEQ ID NO: 57411 - protein, 25 aa, Homo sapiens
CARHANYYDSSGRPAQPSLPHFDYW

SEQ ID NO: 57412 - protein, 21 aa, Homo sapiens
CARVIFQMTLLTTGNWYFDLW

SEQ ID NO: 57413 - protein, 21 aa, Homo sapiens
CAHRPRSSLSLLAAADWFDPW

SEQ ID NO: 57414 - protein, 19 aa, Homo sapiens
CASYGSMVSAMVKDYFDYW

SEQ ID NO: 57415 - protein, 20 aa, Homo sapiens
CARHGPPQDTSWTLYYFDYW

SEQ ID NO: 57416 - protein, 21 aa, Homo sapiens
CARHGEFCSGGSCYWWILDYW

SEQ ID NO: 57417 - protein, 21 aa, Homo sapiens
CARDILHYYGSGTLGGAFDPW

SEQ ID NO: 57418 - protein, 18 aa, Homo sapiens
CAGPRQWLVKTKLPIDYW

SEQ ID NO: 57419 - protein, 15 aa, Homo sapiens
CARIGLLTGDPFDYW

SEQ ID NO: 57420 - protein, 24 aa, Homo sapiens
CARVSPGTCGSGGSCYRGWYFDLW

SEQ ID NO: 57421 - protein, 18 aa, Homo sapiens
CAHRRIQALATSFAFDIW

SEQ ID NO: 57422 - protein, 16 aa, Homo sapiens
CAHRLVVVNRMGFDYW

SEQ ID NO: 57423 - protein, 28 aa, Homo sapiens
CARDTDTRQLYVWGSYFPDYYYYGMDVW

SEQ ID NO: 57424 - protein, 21 aa, Homo sapiens
CARDSTEGVIVVVMGGFFDYW

SEQ ID NO: 57425 - protein, 23 aa, Homo sapiens
CVRFPPHYEILSEYRPYYAMDIW

SEQ ID NO: 57426 - protein, 24 aa, Homo sapiens
CARVELGYSSGWYGLYYYYGMDVW

SEQ ID NO: 57427 - protein, 21 aa, Homo sapiens
CASLLQLWLLGGIGESYVDYW

SEQ ID NO: 57428 - protein, 19 aa, Homo sapiens
CARGTNTAVAGLSNVFDYW

SEQ ID NO: 57429 - protein, 14 aa, Homo sapiens
CAAGGAATDSFDYW

SEQ ID NO: 57430 - protein, 20 aa, Homo sapiens
CARDMTTVTTWAWKDAFDIW

SEQ ID NO: 57431 - protein, 20 aa, Homo sapiens
CAKDYGDYMDYYYYYGMDVW

SEQ ID NO: 57432 - protein, 15 aa, Homo sapiens
CARMAGMMGAAIDYW

SEQ ID NO: 57433 - protein, 37 aa, Homo sapiens
CARIGPEGGGYSGYDWWELLRDVHYPAEVKEYYFDYW

SEQ ID NO: 57434 - protein, 18 aa, Homo sapiens
CAKGYSSGWRWNVAFDIW

SEQ ID NO: 57435 - protein, 21 aa, Homo sapiens
CARDPIGGSSSWYGWNYFDYW

SEQ ID NO: 57436 - protein, 19 aa, Homo sapiens
CAKIAGSEQWLVGDGMDVW

SEQ ID NO: 57437 - protein, 17 aa, Homo sapiens
CARQPSGSYYKRWFDPW

SEQ ID NO: 57438 - protein, 19 aa, Homo sapiens
CARHLPGWQWPQNYYFDYW

SEQ ID NO: 57439 - protein, 17 aa, Homo sapiens
CVKGRATYGDHAYFDSW

SEQ ID NO: 57440 - protein, 13 aa, Homo sapiens
CARDLTGSYSNYW

SEQ ID NO: 57441 - protein, 23 aa, Homo sapiens
CARDVVRVGVPAAYYYYYGMDVW

SEQ ID NO: 57442 - protein, 16 aa, Homo sapiens
CARDTVTTRDDAFDIW

SEQ ID NO: 57443 - protein, 13 aa, Homo sapiens
CAKGSGYEKFDSW

SEQ ID NO: 57444 - protein, 21 aa, Homo sapiens
CARDLGLLWFGELPPNWFDPW

SEQ ID NO: 57445 - protein, 18 aa, Homo sapiens
CAKGAYVGYDPHYYFDYW

SEQ ID NO: 57446 - protein, 17 aa, Homo sapiens
CAAAPDRGYSAFAFRYW

SEQ ID NO: 57447 - protein, 21 aa, Homo sapiens
CARFYFGDCSGGTCNYYFDYW

SEQ ID NO: 57448 - protein, 11 aa, Homo sapiens
CQSADNSGSLF

SEQ ID NO: 57449 - protein, 23 aa, Homo sapiens
CARDSYYYDSSGYYLFVGWFDPW

SEQ ID NO: 57450 - protein, 19 aa, Homo sapiens
CAHSGGIVGATTGEYFQHW

SEQ ID NO: 57451 - protein, 19 aa, Homo sapiens
CARGGWSSGYLLNWYFDLW

SEQ ID NO: 57452 - protein, 21 aa, Homo sapiens
CARYVYRVGGIYIPEWYFDVW

SEQ ID NO: 57453 - protein, 19 aa, Homo sapiens
CARHPPIWFGELSSWFDPW

SEQ ID NO: 57454 - protein, 17 aa, Homo sapiens
CARDQEDSGYDSCFDYW

SEQ ID NO: 57455 - protein, 18 aa, Homo sapiens
CARDRSSGYQSRHYFDYW

SEQ ID NO: 57456 - protein, 17 aa, Homo sapiens
CARDNVGSGWLHPFDYW

SEQ ID NO: 57457 - protein, 20 aa, Homo sapiens
CARNGCDGDCYPGLDSFDMW

SEQ ID NO: 57458 - protein, 16 aa, Homo sapiens
CARGTAMVRGAFPDYW

SEQ ID NO: 57459 - protein, 18 aa, Homo sapiens
CVRQGSHNTEWFWYFDLW

SEQ ID NO: 57460 - protein, 21 aa, Homo sapiens
CARDIRVRYYDSSGYPGFDYW

SEQ ID NO: 57461 - protein, 12 aa, Homo sapiens
CARMVATIKDYW

SEQ ID NO: 57462 - protein, 16 aa, Homo sapiens
CALVGFGEFHDAFDIW

SEQ ID NO: 57463 - protein, 18 aa, Homo sapiens
CARGPTDEVVVITYFDSW

SEQ ID NO: 57464 - protein, 20 aa, Homo sapiens
CAKSLSTVTTDYYYYGMDVW

SEQ ID NO: 57465 - protein, 20 aa, Homo sapiens
CTKGGVYSSGQFYPNYFDSW

SEQ ID NO: 57466 - protein, 20 aa, Homo sapiens
CAKDQTDSSGYTYYNWFDPW

SEQ ID NO: 57467 - protein, 16 aa, Homo sapiens
CARGTPGYSSSWHDSW

SEQ ID NO: 57468 - protein, 19 aa, Homo sapiens
CARLIYCTGGNCWYYFDNW

SEQ ID NO: 57469 - protein, 18 aa, Homo sapiens
CARHESVRGVHALLFDYW

SEQ ID NO: 57470 - protein, 14 aa, Homo sapiens
CWGYSYGSYYFDYW

SEQ ID NO: 57471 - protein, 21 aa, Homo sapiens
CAREVIVPAGVSGLSSTFDIW

SEQ ID NO: 57472 - protein, 19 aa, Homo sapiens
CAKVARATVVTTDWYFDLW

SEQ ID NO: 57473 - protein, 21 aa, Homo sapiens
CARDYKVQLWSDYYYYGMDVW

SEQ ID NO: 57474 - protein, 23 aa, Homo sapiens
CAKDYYDYVWGSYRYMGPNFDYW

SEQ ID NO: 57475 - protein, 21 aa, Homo sapiens
CARGPERWLQLVLITFFFDIW

SEQ ID NO: 57476 - protein, 19 aa, Homo sapiens
CAKNPCGSSTCYYYGMDVW

SEQ ID NO: 57477 - protein, 18 aa, Homo sapiens
CARGPVGQWLVTRNFDYW

SEQ ID NO: 57478 - protein, 22 aa, Homo sapiens
CARDIGGYLLSSGWLDWYFDLW

SEQ ID NO: 57479 - protein, 12 aa, Homo sapiens
CSSYTSTSTQAF

SEQ ID NO: 57480 - protein, 20 aa, Homo sapiens
CARVASEYYDSSGHGAFDYW

SEQ ID NO: 57481 - protein, 23 aa, Homo sapiens
CATISQSYYNVLGGQAPKWFDPW

SEQ ID NO: 57482 - protein, 21 aa, Homo sapiens
CARGGSGWYFGENYYYGMDVW

SEQ ID NO: 57483 - protein, 23 aa, Homo sapiens
CARLSPGYCSGGSCYKSRYFDLW

SEQ ID NO: 57484 - protein, 22 aa, Homo sapiens
CARAPGISGWYNYYYYYGMDVW

SEQ ID NO: 57485 - protein, 14 aa, Homo sapiens
CARAMGGYAGGDYW

SEQ ID NO: 57486 - protein, 18 aa, Homo sapiens
CAKDISGLIAVAGYLDYW

SEQ ID NO: 57487 - protein, 15 aa, Homo sapiens
CATHSSSWYSHLDYW

SEQ ID NO: 57488 - protein, 19 aa, Homo sapiens
CARDPYPFGSSHDWYFDLW

SEQ ID NO: 57489 - protein, 15 aa, Homo sapiens
CARDPQRGYSYVDYW

SEQ ID NO: 57490 - protein, 15 aa, Homo sapiens
CARVAVAKSLGFDYW

SEQ ID NO: 57491 - protein, 17 aa, Homo sapiens
CATPRFTQLWSSAYDYW

SEQ ID NO: 57492 - protein, 18 aa, Homo sapiens
CARVHIVVVPAARWFDPW

SEQ ID NO: 57493 - protein, 19 aa, Homo sapiens
CARIRLEYSSSWYYAFDIW

SEQ ID NO: 57494 - protein, 24 aa, Homo sapiens
CARHPGYCSGGSCYSGVGAPFDYW

SEQ ID NO: 57495 - protein, 20 aa, Homo sapiens
CARAGNYYGSGSYPDAFDIW

SEQ ID NO: 57496 - protein, 22 aa, Homo sapiens
CASVPGYSSSWYRWGQYYFDYW

SEQ ID NO: 57497 - protein, 18 aa, Homo sapiens
CATWYYYGSGSYYSFDYW

SEQ ID NO: 57498 - protein, 28 aa, Homo sapiens
CARDQFMGQQLASPTRGTYYYYYGMDVW

SEQ ID NO: 57499 - protein, 15 aa, Homo sapiens
CVRDKGGSKWFFDLW

SEQ ID NO: 57500 - protein, 19 aa, Homo sapiens
CARGSGGLGGTYYYGMDVW

SEQ ID NO: 57501 - protein, 11 aa, Homo sapiens
CGKHTGLFEYW

SEQ ID NO: 57502 - protein, 14 aa, Homo sapiens
CARILAPIAVADYW

SEQ ID NO: 57503 - protein, 16 aa, Homo sapiens
CVKGNSGSYVSDFDYW

SEQ ID NO: 57504 - protein, 19 aa, Homo sapiens
CARDRRGWLQSPDGGFDYW

SEQ ID NO: 57505 - protein, 20 aa, Homo sapiens
CARQASYYDSSGYYYSYDYW

SEQ ID NO: 57506 - protein, 33 aa, Homo sapiens
CAKEHKPYCSSTSCYVEEGGEARYYYYYGMDVW

SEQ ID NO: 57507 - protein, 23 aa, Homo sapiens
CASKAKDYDILTGYYYYYGMDVW

SEQ ID NO: 57508 - protein, 17 aa, Homo sapiens
CARPRGGTGGYYYLGYW

SEQ ID NO: 57509 - protein, 16 aa, Homo sapiens
CASPGPSYGGLPFDYW

SEQ ID NO: 57510 - protein, 20 aa, Homo sapiens
CARERYCGGGSCYQWNFDYW

SEQ ID NO: 57511 - protein, 21 aa, Homo sapiens
CASFSYYYYDSSGYYLPDDYW

SEQ ID NO: 57512 - protein, 19 aa, Homo sapiens
CARHGARWLHSIEDFFDYW

SEQ ID NO: 57513 - protein, 19 aa, Homo sapiens
CARGGPTPGATEGEYFDYW

SEQ ID NO: 57514 - protein, 19 aa, Homo sapiens
CAKDMVRGVLVRGDAFHVW

SEQ ID NO: 57515 - protein, 13 aa, Homo sapiens
CARITPKTVFDPW

SEQ ID NO: 57516 - protein, 15 aa, Homo sapiens
CAREAPNWRDAFDIW

SEQ ID NO: 57517 - protein, 18 aa, Homo sapiens
CAYSSSWYWTYYYGMDVW

SEQ ID NO: 57518 - protein, 20 aa, Homo sapiens
CASISCSSTSCYYYYGMDVW

SEQ ID NO: 57519 - protein, 21 aa, Homo sapiens
CATWRLVRGAIPYYYYGMDVW

SEQ ID NO: 57520 - protein, 22 aa, Homo sapiens
CARQVADYYGSGSPFLVWFDIW

SEQ ID NO: 57521 - protein, 24 aa, Homo sapiens
CATLPSSSVRGVIRASEYNWFDPW

SEQ ID NO: 57522 - protein, 24 aa, Homo sapiens
CARTLGGVVVTAIPVDYYYGMDVW

SEQ ID NO: 57523 - protein, 16 aa, Homo sapiens
CAREGYGYQTEAFDIW

SEQ ID NO: 57524 - protein, 15 aa, Homo sapiens
CARGWGQGLASFDIW

SEQ ID NO: 57525 - protein, 23 aa, Homo sapiens
CARDGLGVSGSYSHYYYYGMDVW

SEQ ID NO: 57526 - protein, 22 aa, Homo sapiens
CARGVVLLWFGDPPGDYYFDYW

SEQ ID NO: 57527 - protein, 20 aa, Homo sapiens
CAREQWLPDNYYYYYGMDVW

SEQ ID NO: 57528 - protein, 21 aa, Homo sapiens
CARGFPMGLIVGATGDAFDIW

SEQ ID NO: 57529 - protein, 19 aa, Homo sapiens
CASVKAAAGTLAPYYFDYW

SEQ ID NO: 57530 - protein, 25 aa, Homo sapiens
CARHGGTMVRGVIISDYYYYGMDVW

SEQ ID NO: 57531 - protein, 16 aa, Homo sapiens
CATEPSSSWYDDFDYW

SEQ ID NO: 57532 - protein, 15 aa, Homo sapiens
CAKDFNGNYDDFDYW

SEQ ID NO: 57533 - protein, 21 aa, Homo sapiens
CARNWAYFYESSGYSQAFDYW

SEQ ID NO: 57534 - protein, 17 aa, Homo sapiens
CAKGPWELPNFVALDYW

SEQ ID NO: 57535 - protein, 24 aa, Homo sapiens
CAREFSGYSSGWPHYYYYYGMDVW

SEQ ID NO: 57536 - protein, 20 aa, Homo sapiens
CARDIPVADSSGWSDAFDIW

SEQ ID NO: 57537 - protein, 20 aa, Homo sapiens
CARTYYDILTDSSIDAFDIW

SEQ ID NO: 57538 - protein, 22 aa, Homo sapiens
CARGGGYYDSSGYFHPDAFDIW

SEQ ID NO: 57539 - protein, 16 aa, Homo sapiens
CASSGVAAAGTNFDYW

SEQ ID NO: 57540 - protein, 16 aa, Homo sapiens
CAHRVVQNRGPYFDYW

SEQ ID NO: 57541 - protein, 20 aa, Homo sapiens
CASGVTYYYDSSGYYFVDYW

SEQ ID NO: 57542 - protein, 23 aa, Homo sapiens
CAKGDTYYDILTGYLLVGRFDYW

SEQ ID NO: 57543 - protein, 17 aa, Homo sapiens
CAKDQAIGYSGSYLSYW

SEQ ID NO: 57544 - protein, 20 aa, Homo sapiens
CARGGWANGSGIKGWWFDPW

SEQ ID NO: 57545 - protein, 24 aa, Homo sapiens
CARALADYDYVWGSYRLPPNFDYW

SEQ ID NO: 57546 - protein, 22 aa, Homo sapiens
CARGALGYCSGGSCYNKGFDPW

SEQ ID NO: 57547 - protein, 17 aa, Homo sapiens
CARDLGDGYNNAWFDPW

SEQ ID NO: 57548 - protein, 18 aa, Homo sapiens
CAKALPRSSWYGNAFDIW

SEQ ID NO: 57549 - protein, 12 aa, Homo sapiens
CSLRWYGPLDYW

SEQ ID NO: 57550 - protein, 22 aa, Homo sapiens
CTTDPWRYYYDSSTYYPFFDYW

SEQ ID NO: 57551 - protein, 23 aa, Homo sapiens
CAREPDTYYDILTGYYPYYFDYW

SEQ ID NO: 57552 - protein, 18 aa, Homo sapiens
CAREADRNTNSWYPFDSW

SEQ ID NO: 57553 - protein, 18 aa, Homo sapiens
CARTWVDTAMVGAAFDIW

SEQ ID NO: 57554 - protein, 17 aa, Homo sapiens
CAKDSTVTTVSDWFDPW

SEQ ID NO: 57555 - protein, 18 aa, Homo sapiens
CAHLPSSSWYFDNWFDPW

SEQ ID NO: 57556 - protein, 19 aa, Homo sapiens
CARQVPGGSSWLEYYFDYW

SEQ ID NO: 57557 - protein, 15 aa, Homo sapiens
CAKGDLGELLSVDYW

SEQ ID NO: 57558 - protein, 20 aa, Homo sapiens
CAKDIEYSGSDYYYYGMDVW

SEQ ID NO: 57559 - protein, 17 aa, Homo sapiens
CAKDIGGDYLGDAFDIW

SEQ ID NO: 57560 - protein, 15 aa, Homo sapiens
CARDGNGYKGEFDSW

SEQ ID NO: 57561 - protein, 21 aa, Homo sapiens
CARDNPPAAGTFLHFWYFDYW

SEQ ID NO: 57562 - protein, 13 aa, Homo sapiens
CARDLPHKGIDYW

SEQ ID NO: 57563 - protein, 17 aa, Homo sapiens
CAKEIGYGDFFDAFDIW

SEQ ID NO: 57564 - protein, 22 aa, Homo sapiens
CAKTIGMMQQLPKDYYYGMDVW

SEQ ID NO: 57565 - protein, 16 aa, Homo sapiens
CAVSLRYFDWSVYDYW

SEQ ID NO: 57566 - protein, 22 aa, Homo sapiens
CAKSLKIWWEQWLVHVGEIDYW

SEQ ID NO: 57567 - protein, 21 aa, Homo sapiens
CAKLGIYGDYVQKISDAFDIW

SEQ ID NO: 57568 - protein, 19 aa, Homo sapiens
CARGYGIRRWLQLYYFDYW

SEQ ID NO: 57569 - protein, 21 aa, Homo sapiens
CARAQNYDLFSGHYNNFFDPW

SEQ ID NO: 57570 - protein, 16 aa, Homo sapiens
CARPLSPSGLDGFDIW

SEQ ID NO: 57571 - protein, 27 aa, Homo sapiens
CARDRRPTMVRDIFKENYYYYYGMDVW

SEQ ID NO: 57572 - protein, 15 aa, Homo sapiens
CAHRGTWIRGIFDYW

SEQ ID NO: 57573 - protein, 21 aa, Homo sapiens
CARDSNWAASGPYYYYGMDVW

SEQ ID NO: 57574 - protein, 24 aa, Homo sapiens
CARDRVDLYQLLFNVLGRGWFDPW

SEQ ID NO: 57575 - protein, 16 aa, Homo sapiens
CAVTGSGWYAWYFDLW

SEQ ID NO: 57576 - protein, 20 aa, Homo sapiens
CAREEATYYYGSGTVAFDIW

SEQ ID NO: 57577 - protein, 17 aa, Homo sapiens
CARYYSDSSGWGFFDYW

SEQ ID NO: 57578 - protein, 22 aa, Homo sapiens
CARVSSFHSSWYSYYYYGMDVW

SEQ ID NO: 57579 - protein, 17 aa, Homo sapiens
CARDQEQDILTGYYDPW

SEQ ID NO: 57580 - protein, 23 aa, Homo sapiens
CARAPNEVLLWFGEPWDNWFDPW

SEQ ID NO: 57581 - protein, 15 aa, Homo sapiens
CARGWSSGLYAFDIW

SEQ ID NO: 57582 - protein, 24 aa, Homo sapiens
CAHRPSPYYDILTGYYTEVGFDYW

SEQ ID NO: 57583 - protein, 20 aa, Homo sapiens
CARWGVAATGASYYYGMDVW

SEQ ID NO: 57584 - protein, 21 aa, Homo sapiens
CARGGLVWFGQLLSGDWFDPW

SEQ ID NO: 57585 - protein, 21 aa, Homo sapiens
CARDYEETYYYGSGTYFFEYW

SEQ ID NO: 57586 - protein, 18 aa, Homo sapiens
CARAIWYSSSWYPHFDPW

SEQ ID NO: 57587 - protein, 23 aa, Homo sapiens
CARDWHRIQLWTPGVYYYGMDVW

SEQ ID NO: 57588 - protein, 26 aa, Homo sapiens
CAHSPDIRVYDILTGYSLYDPYFDYW

SEQ ID NO: 57589 - protein, 13 aa, Homo sapiens
CQQYYSSPPSDSF

SEQ ID NO: 57590 - protein, 24 aa, Homo sapiens
CARGGWRVGAHTYLALPFDWFDPW

SEQ ID NO: 57591 - protein, 24 aa, Homo sapiens
CASRLGGYSGYDPPTYYYYGMDVW

SEQ ID NO: 57592 - protein, 15 aa, Homo sapiens
CAKVSAVSPGCFDYW

SEQ ID NO: 57593 - protein, 18 aa, Homo sapiens
CARHVWFGESLEWYFDYW

SEQ ID NO: 57594 - protein, 22 aa, Homo sapiens
CAKDRDWYYYDSSGYSIYFDYW

SEQ ID NO: 57595 - protein, 21 aa, Homo sapiens
CAKDKEDGYCSSTSCLTLDYW

SEQ ID NO: 57596 - protein, 25 aa, Homo sapiens
CARIPNRIYYDSSGYYFRGGYFDYW

SEQ ID NO: 57597 - protein, 18 aa, Homo sapiens
CARHVFATVSRYWYFDLW

SEQ ID NO: 57598 - protein, 19 aa, Homo sapiens
CARDYRLGAAADPVHFDYW

SEQ ID NO: 57599 - protein, 16 aa, Homo sapiens
CASSVPPRYRYAFDIW

SEQ ID NO: 57600 - protein, 12 aa, Homo sapiens
CQQYYSGEGYSF

SEQ ID NO: 57601 - protein, 21 aa, Homo sapiens
CARVPLPGYGGTYYYYGMDVW

SEQ ID NO: 57602 - protein, 21 aa, Homo sapiens
CARHVRLYYYDSSGYNWFDPW

SEQ ID NO: 57603 - protein, 18 aa, Homo sapiens
CAHRRGSWGLRDYYFDYW

SEQ ID NO: 57604 - protein, 20 aa, Homo sapiens
CARCVSVVAASPGICEFDYW

SEQ ID NO: 57605 - protein, 20 aa, Homo sapiens
CARHSIGYGYYYYYYGMDVW

SEQ ID NO: 57606 - protein, 14 aa, Homo sapiens
CARTVAPIVVIDYW

SEQ ID NO: 57607 - protein, 18 aa, Homo sapiens
CAKDEWELLLLPSSFDYW

SEQ ID NO: 57608 - protein, 16 aa, Homo sapiens
CAKGGYSSSSRWFDPW

SEQ ID NO: 57609 - protein, 20 aa, Homo sapiens
CARRVRMIVVVITGRWFDPW

SEQ ID NO: 57610 - protein, 20 aa, Homo sapiens
CAKEPSSSWYDFLHYYFDYW

SEQ ID NO: 57611 - protein, 18 aa, Homo sapiens
CATERSARTMVRGVIDYW

SEQ ID NO: 57612 - protein, 19 aa, Homo sapiens
CARSNYDILTAQSVPFDYW

SEQ ID NO: 57613 - protein, 25 aa, Homo sapiens
CAKDGDGCSGGTCYNPLLNNWFDPW

SEQ ID NO: 57614 - protein, 19 aa, Homo sapiens
CARSNYDILTGYLWAFDYW

SEQ ID NO: 57615 - protein, 27 aa, Homo sapiens
CAKDLDSSGWYRALAGSTYYYYGMDVW

SEQ ID NO: 57616 - protein, 23 aa, Homo sapiens
CAITFGRAAMLGILYYYYGMDVW

SEQ ID NO: 57617 - protein, 20 aa, Homo sapiens
CTTDLMDFDWLVEHDAFDIW

SEQ ID NO: 57618 - protein, 11 aa, Homo sapiens
CTTDSGYVDYW

SEQ ID NO: 57619 - protein, 21 aa, Homo sapiens
CARRDYVEMATILGTDAFDIW

SEQ ID NO: 57620 - protein, 18 aa, Homo sapiens
CAGYQLLKGQYYYGMDVW

SEQ ID NO: 57621 - protein, 16 aa, Homo sapiens
CAKVDGYASSYYFPSW

SEQ ID NO: 57622 - protein, 16 aa, Homo sapiens
CARIHVGATTGGADYW

SEQ ID NO: 57623 - protein, 19 aa, Homo sapiens
CAGSHVANIAAAEGWFDPW

SEQ ID NO: 57624 - protein, 14 aa, Homo sapiens
CARDLEIVVPLDYW

SEQ ID NO: 57625 - protein, 13 aa, Homo sapiens
CGSGGATGANDYW

SEQ ID NO: 57626 - protein, 25 aa, Homo sapiens
CTRVGPDYYDILTGYYSSYYGMDVW

SEQ ID NO: 57627 - protein, 28 aa, Homo sapiens
CARDGPANYDILTGWARRYLYYYGMDVW

SEQ ID NO: 57628 - protein, 21 aa, Homo sapiens
CARELVDYGSGSSRNYYFDYW

SEQ ID NO: 57629 - protein, 19 aa, Homo sapiens
CAKGGWFGEPFEDLPFDYW

SEQ ID NO: 57630 - protein, 23 aa, Homo sapiens
CARVRDYGAPPPLYKFYFAMDVW

SEQ ID NO: 57631 - protein, 16 aa, Homo sapiens
CARDPGHDSWWGPDYW

SEQ ID NO: 57632 - protein, 13 aa, Homo sapiens
CARANPRNYGDYW

SEQ ID NO: 57633 - protein, 18 aa, Homo sapiens
CARAGDVVVIPVATFEYW

SEQ ID NO: 57634 - protein, 25 aa, Homo sapiens
CAKHPVGTTIIQVAFFRDEWYFDLW

SEQ ID NO: 57635 - protein, 18 aa, Homo sapiens
CARFILNDRLCSDGFDYW

SEQ ID NO: 57636 - protein, 12 aa, Homo sapiens
CYSATDNKYVVF

SEQ ID NO: 57637 - protein, 23 aa, Homo sapiens
CARSRMITFGGVIVSVFDGMDVW

SEQ ID NO: 57638 - protein, 15 aa, Homo sapiens
CAKLPAAGHEHFDYW

SEQ ID NO: 57639 - protein, 16 aa, Homo sapiens
CASSSSWYIEGAFDIW

SEQ ID NO: 57640 - protein, 23 aa, Homo sapiens
CARDLYYYDSSGYGQSSGYFDYW

SEQ ID NO: 57641 - protein, 18 aa, Homo sapiens
CARHAGSGYYHEAYPDYW

SEQ ID NO: 57642 - protein, 23 aa, Homo sapiens
CARDPAKMITFGGVIVTRYFDLW

SEQ ID NO: 57643 - protein, 17 aa, Homo sapiens
CASSPGDVYYYYGMDVW

SEQ ID NO: 57644 - protein, 23 aa, Homo sapiens
CARKGLGNYDILTGYYSRAFDIW

SEQ ID NO: 57645 - protein, 23 aa, Homo sapiens
CARDRRIQLWLTENYYYYGMDVW

SEQ ID NO: 57646 - protein, 22 aa, Homo sapiens
CAKDSRYCSSTSCYIPYYFDYW

SEQ ID NO: 57647 - protein, 16 aa, Homo sapiens
CASAPLSVRWYSFDYW

SEQ ID NO: 57648 - protein, 24 aa, Homo sapiens
CAKDSYIVATGGEHYYYYYGMDVW

SEQ ID NO: 57649 - protein, 20 aa, Homo sapiens
CARTPPGGSGWYGYYGMDVW

SEQ ID NO: 57650 - protein, 14 aa, Homo sapiens
CARTSDGYRVFDSW

SEQ ID NO: 57651 - protein, 19 aa, Homo sapiens
CARGEESPRLRYFDCNDYW

SEQ ID NO: 57652 - protein, 18 aa, Homo sapiens
CARGVAVAGELFYYFDYW

SEQ ID NO: 57653 - protein, 26 aa, Homo sapiens
CAKGRCGSNSCQNREGLYYYNGMDVW

SEQ ID NO: 57654 - protein, 26 aa, Homo sapiens
CARGGLAVQYSSGWFYPYYYYGMDVW

SEQ ID NO: 57655 - protein, 19 aa, Homo sapiens
CASNYYYGSGSLASPFDYW

SEQ ID NO: 57656 - protein, 20 aa, Homo sapiens
CAKDQWVGTGSYHWGRFDPW

SEQ ID NO: 57657 - protein, 25 aa, Homo sapiens
CARDLNHGSPEDYYDSSAKAGFDIW

SEQ ID NO: 57658 - protein, 23 aa, Homo sapiens
CAKVVGWEVTMIVVVGMYYFDYW

SEQ ID NO: 57659 - protein, 24 aa, Homo sapiens
CARETQASYDILTGYYRLYYFDYW

SEQ ID NO: 57660 - protein, 20 aa, Homo sapiens
CARHDTQGEQWPTWNWFDPW

SEQ ID NO: 57661 - protein, 23 aa, Homo sapiens
CARLGRYFDWLGSSDYYYGMDVW

SEQ ID NO: 57662 - protein, 17 aa, Homo sapiens
CARLACSSTSCSQFDPW

SEQ ID NO: 57663 - protein, 16 aa, Homo sapiens
CARESLTRNWSSFDSW

SEQ ID NO: 57664 - protein, 19 aa, Homo sapiens
CARVPAGVEWLQSWYFDLW

SEQ ID NO: 57665 - protein, 21 aa, Homo sapiens
CATDQSFCSGGSCYSTELDYW

SEQ ID NO: 57666 - protein, 17 aa, Homo sapiens
CARDNSSWYRRDAFDIW

SEQ ID NO: 57667 - protein, 17 aa, Homo sapiens
CARVGYSGYVLDWFDPW

SEQ ID NO: 57668 - protein, 20 aa, Homo sapiens
CARGRGSSSWYFIVNWFDPW

SEQ ID NO: 57669 - protein, 20 aa, Homo sapiens
CARARYSSSWYGDRNWFDPW

SEQ ID NO: 57670 - protein, 20 aa, Homo sapiens
CARDNRRWLQLRAIDAFDIW

SEQ ID NO: 57671 - protein, 20 aa, Homo sapiens
CARPDYDIPTAYFRRGFDLW

SEQ ID NO: 57672 - protein, 16 aa, Homo sapiens
CAREVGYSSGWLTDYW

SEQ ID NO: 57673 - protein, 15 aa, Homo sapiens
CAAYRTTLGSYFEFW

SEQ ID NO: 57674 - protein, 14 aa, Homo sapiens
CATVVTDVDAFDIW

SEQ ID NO: 57675 - protein, 20 aa, Homo sapiens
CASGPSLWFGELRPTWFDPW

SEQ ID NO: 57676 - protein, 24 aa, Homo sapiens
CAKDIFPLVSSSWYDTASRWFDPW

SEQ ID NO: 57677 - protein, 27 aa, Homo sapiens
CAKDGVGAAAGTWYLTEGTYYYGMDVW

SEQ ID NO: 57678 - protein, 17 aa, Homo sapiens
CARGMLFEEVLSPLDYW

SEQ ID NO: 57679 - protein, 20 aa, Homo sapiens
CATIDMVRGVITPRWRTDYW

SEQ ID NO: 57680 - protein, 23 aa, Homo sapiens
CAKGNPYGSSGPYFYYYYGMDVW

SEQ ID NO: 57681 - protein, 22 aa, Homo sapiens
CARATSRRLYYYDSSGYYFDYW

SEQ ID NO: 57682 - protein, 29 aa, Homo sapiens
CARGVVGVRGYYYGSGSYLNSYYYGMDVW

SEQ ID NO: 57683 - protein, 22 aa, Homo sapiens
CARGSDIVVVTAIGPAEYFQHW

SEQ ID NO: 57684 - protein, 13 aa, Homo sapiens
CARPSTYSDFDSW

SEQ ID NO: 57685 - protein, 17 aa, Homo sapiens
CAKMHVVSWLPAFPDYW

SEQ ID NO: 57686 - protein, 15 aa, Homo sapiens
CALLGYYQSWYFDLW

SEQ ID NO: 57687 - protein, 18 aa, Homo sapiens
CARDAGGDPFSTDYFDYW

SEQ ID NO: 57688 - protein, 24 aa, Homo sapiens
CARLTGKYDYGSGSYSYYYGMDVW

SEQ ID NO: 57689 - protein, 18 aa, Homo sapiens
CARDPDSSGWYSQEFDHW

SEQ ID NO: 57690 - protein, 16 aa, Homo sapiens
CARGTDSSSWLPFDYW

SEQ ID NO: 57691 - protein, 22 aa, Homo sapiens
CARDDCSGGSCYGPSDWYFDLW

SEQ ID NO: 57692 - protein, 18 aa, Homo sapiens
CAVQVDSGYDPFGAFDYW

SEQ ID NO: 57693 - protein, 22 aa, Homo sapiens
CARDPDYSRGGRVGTISGLDYW

SEQ ID NO: 57694 - protein, 19 aa, Homo sapiens
CARVRDTLTGLAYWYFDLW

SEQ ID NO: 57695 - protein, 21 aa, Homo sapiens
CARRGYIYGSPNQRYSALDVW

SEQ ID NO: 57696 - protein, 20 aa, Homo sapiens
CATAERLCSSTSCYTGFDYW

SEQ ID NO: 57697 - protein, 14 aa, Homo sapiens
CAHRPGDSSGFNYW

SEQ ID NO: 57698 - protein, 18 aa, Homo sapiens
CARGYYGSENINWYFDLW

SEQ ID NO: 57699 - protein, 21 aa, Homo sapiens
CARTPGWCSDNHCYFGAFDVW

SEQ ID NO: 57700 - protein, 19 aa, Homo sapiens
CAHRQIERDFYGDYKFDYW

SEQ ID NO: 57701 - protein, 13 aa, Homo sapiens
CQSYDSRVPQMVF

SEQ ID NO: 57702 - protein, 22 aa, Homo sapiens
CARCLAVAGAPFDYYYYGMDVW

SEQ ID NO: 57703 - protein, 15 aa, Homo sapiens
CASPFYGGNSGLDYW

SEQ ID NO: 57704 - protein, 29 aa, Homo sapiens
CARGQVFNTPEYGDYGVDEYYYYYGMDVW

SEQ ID NO: 57705 - protein, 17 aa, Homo sapiens
CARPLMPWRALEYFQHW

SEQ ID NO: 57706 - protein, 16 aa, Homo sapiens
CARLSFGESDFFFDYW

SEQ ID NO: 57707 - protein, 14 aa, Homo sapiens
CASMGWELLHFDYW

SEQ ID NO: 57708 - protein, 19 aa, Homo sapiens
CARDNTPGYSSYTYYFDYW

SEQ ID NO: 57709 - protein, 17 aa, Homo sapiens
CAKVGIEWLVGGTVDYW

SEQ ID NO: 57710 - protein, 17 aa, Homo sapiens
CATELASGYDSVYFDYW

SEQ ID NO: 57711 - protein, 20 aa, Homo sapiens
CATDRPLWFGDGGRGWFDPW

SEQ ID NO: 57712 - protein, 16 aa, Homo sapiens
CAREAATGTGDAFHIW

SEQ ID NO: 57713 - protein, 19 aa, Homo sapiens
CASFLREYSGSYYVAFDIW

SEQ ID NO: 57714 - protein, 19 aa, Homo sapiens
CARPPYSSDWYKFAYFQHW

SEQ ID NO: 57715 - protein, 17 aa, Homo sapiens
CARVHVGAVAGLPFDYW

SEQ ID NO: 57716 - protein, 18 aa, Homo sapiens
CAKDSEDCSSTSCYADYW

SEQ ID NO: 57717 - protein, 16 aa, Homo sapiens
CAHKPFSVAGTHFDYW

SEQ ID NO: 57718 - protein, 18 aa, Homo sapiens
CATCRGGSSCYADPYDYW

SEQ ID NO: 57719 - protein, 23 aa, Homo sapiens
CARDGGADSSWYKYYYYYGMDVW

SEQ ID NO: 57720 - protein, 14 aa, Homo sapiens
CARGRLLPYRLDYW

SEQ ID NO: 57721 - protein, 20 aa, Homo sapiens
CAGLYGSGSYSPYYYGMDVW

SEQ ID NO: 57722 - protein, 19 aa, Homo sapiens
CAKGASYCSSTSCYHFDYW

SEQ ID NO: 57723 - protein, 17 aa, Homo sapiens
CARCGGGSCYSGGLDYW

SEQ ID NO: 57724 - protein, 16 aa, Homo sapiens
CAHRGTTVTGHYFDYW

SEQ ID NO: 57725 - protein, 18 aa, Homo sapiens
CATQRGWYSSSWYVFDYW

SEQ ID NO: 57726 - protein, 16 aa, Homo sapiens
CSRIEGITAAAPFDPW

SEQ ID NO: 57727 - protein, 18 aa, Homo sapiens
CAAPYCSSTSCSDAFDIW

SEQ ID NO: 57728 - protein, 23 aa, Homo sapiens
CARDNGYSGSYYGGDYYYGMDVW

SEQ ID NO: 57729 - protein, 20 aa, Homo sapiens
CAREEDPITMVRGAEWFDPW

SEQ ID NO: 57730 - protein, 16 aa, Homo sapiens
CARWNTVDNTYYFDSW

SEQ ID NO: 57731 - protein, 23 aa, Homo sapiens
CARGLIKYGDYVGYYYYYGMDVW

SEQ ID NO: 57732 - protein, 19 aa, Homo sapiens
CARDIPHSGSYYDDAFDIW

SEQ ID NO: 57733 - protein, 21 aa, Homo sapiens
CARSGNVVVTAMRWVYAFDIW

SEQ ID NO: 57734 - protein, 21 aa, Homo sapiens
CASPYYDILTGPALAGPFDYW

SEQ ID NO: 57735 - protein, 14 aa, Homo sapiens
CARQHEYDMAPDYW

SEQ ID NO: 57736 - protein, 23 aa, Homo sapiens
CARGLTYYDILTGYQTSGAFDIW

SEQ ID NO: 57737 - protein, 17 aa, Homo sapiens
CARAAFYSSGWGYFENW

SEQ ID NO: 57738 - protein, 15 aa, Homo sapiens
CAKTGELGEWYFVLW

SEQ ID NO: 57739 - protein, 24 aa, Homo sapiens
CARDEGRYFDWLFQSERYNLFDYW

SEQ ID NO: 57740 - protein, 20 aa, Homo sapiens
CAAKKHCAGGCRRPYYFDYW

SEQ ID NO: 57741 - protein, 24 aa, Homo sapiens
CARSPDHYDILTGYYRVSYYFDYW

SEQ ID NO: 57742 - protein, 25 aa, Homo sapiens
CARSEGMVLRYFDWSRENEESFDYW

SEQ ID NO: 57743 - protein, 23 aa, Homo sapiens
CARDQAGRATWIQLWSNDAFDIW

SEQ ID NO: 57744 - protein, 11 aa, Homo sapiens
CQAWDTNTAIF

SEQ ID NO: 57745 - protein, 27 aa, Homo sapiens
CAKDDHYHDSSGYYFMGAGTLFLFDYW

SEQ ID NO: 57746 - protein, 27 aa, Homo sapiens
CATATGIAAAGTGLPSSHYYYYGMDVW

SEQ ID NO: 57747 - protein, 13 aa, Homo sapiens
CATTSQWLGFDYW

SEQ ID NO: 57748 - protein, 16 aa, Homo sapiens
CASSMSSYYVDAFDIW

SEQ ID NO: 57749 - protein, 22 aa, Homo sapiens
CASGLDSSGYYYDYYYYGMDVW

SEQ ID NO: 57750 - protein, 13 aa, Homo sapiens
CAHMWFWNYYSYW

SEQ ID NO: 57751 - protein, 25 aa, Homo sapiens
CAKDHPQINMVRGVIITKYNWFDPW

SEQ ID NO: 57752 - protein, 15 aa, Homo sapiens
CAGHYGGGYNWFDPW

SEQ ID NO: 57753 - protein, 14 aa, Homo sapiens
CAKEEGIEYYFDSW

SEQ ID NO: 57754 - protein, 25 aa, Homo sapiens
CARDWSLGWGIFPGPRVPADAFDIW

SEQ ID NO: 57755 - protein, 20 aa, Homo sapiens
CARAEGVWWLRAETLRYDYW

SEQ ID NO: 57756 - protein, 12 aa, Homo sapiens
CVQQQLGYFQRW

SEQ ID NO: 57757 - protein, 26 aa, Homo sapiens
CVRGGSVNTMIRGAMILWVYNWFDPW

SEQ ID NO: 57758 - protein, 17 aa, Homo sapiens
CARTPPYYGDYWYFDLW

SEQ ID NO: 57759 - protein, 23 aa, Homo sapiens
CAHAEFAYDYVRAIYRWYNFDYW

SEQ ID NO: 57760 - protein, 24 aa, Homo sapiens
CARAPVYDILTGYSYYYYYGMDVW

SEQ ID NO: 57761 - protein, 21 aa, Homo sapiens
CARDSGLYGSGSYWYNWFDSW

SEQ ID NO: 57762 - protein, 24 aa, Homo sapiens
CAREEAWRYSYGYQYLEYWYFDLW

SEQ ID NO: 57763 - protein, 21 aa, Homo sapiens
CAKGGVGCSGGSCYLNWFDPW

SEQ ID NO: 57764 - protein, 16 aa, Homo sapiens
CAHRNLGWLQFSFDYW

SEQ ID NO: 57765 - protein, 19 aa, Homo sapiens
CAKDHRGYSYGPNVLFDYW

SEQ ID NO: 57766 - protein, 15 aa, Homo sapiens
CAREVRGYSYGEDYW

SEQ ID NO: 57767 - protein, 17 aa, Homo sapiens
CAKPYGDYVSDLTFDYW

SEQ ID NO: 57768 - protein, 20 aa, Homo sapiens
CARDSMGCSSTSCYPRFDYW

SEQ ID NO: 57769 - protein, 18 aa, Homo sapiens
CAHSTTVVTPDEDYFDYW

SEQ ID NO: 57770 - protein, 17 aa, Homo sapiens
CAKGTSSSWYDAAFDYW

SEQ ID NO: 57771 - protein, 21 aa, Homo sapiens
CAKHMLFSGYDSLADDPLDIW

SEQ ID NO: 57772 - protein, 26 aa, Homo sapiens
CAKVEVITFGGVIVEHFLGGEYFQHW

SEQ ID NO: 57773 - protein, 17 aa, Homo sapiens
CARLHCRGGSCYAFDIW

SEQ ID NO: 57774 - protein, 23 aa, Homo sapiens
CAKADKTLLWFGELSKEHYFDYW

SEQ ID NO: 57775 - protein, 11 aa, Homo sapiens [sequence omitted]

SEQ ID NO: 57776 - protein, 14 aa, Homo sapiens
CAREGGGNNFFDPW

SEQ ID NO: 57777 - protein, 19 aa, Homo sapiens
CARFAATQSPYYYYGMDVW

SEQ ID NO: 57778 - protein, 19 aa, Homo sapiens
CARVPGYGSGIYYYGMDVW

SEQ ID NO: 57779 - protein, 23 aa, Homo sapiens
CAREYKIYHYGLGTYYSYGMDVW

SEQ ID NO: 57780 - protein, 16 aa, Homo sapiens
CARRSAVSGTPTFDYW

SEQ ID NO: 57781 - protein, 19 aa, Homo sapiens
CARDPVQQWHEPNNWFDPW

SEQ ID NO: 57782 - protein, 20 aa, Homo sapiens
CARQDFSPYYYDSSGNFDYW

SEQ ID NO: 57783 - protein, 17 aa, Homo sapiens
CARQNYCSGGSCYYGYW

SEQ ID NO: 57784 - protein, 20 aa, Homo sapiens
CAKSPTEWLFGGVFYYFDYW

SEQ ID NO: 57785 - protein, 17 aa, Homo sapiens
CTRDSAGVRSWSLFDYW

SEQ ID NO: 57786 - protein, 23 aa, Homo sapiens
CARSTAYDYVWGSYRDDYYFDYW

SEQ ID NO: 57787 - protein, 15 aa, Homo sapiens
CAHNTVTPYIWFDPW

SEQ ID NO: 57788 - protein, 24 aa, Homo sapiens
CAKEVRGHYDILTGYYRLYYFDYW

SEQ ID NO: 57789 - protein, 19 aa, Homo sapiens
CARDLGSSTWYLKNWLAPW

SEQ ID NO: 57790 - protein, 19 aa, Homo sapiens
CASQLLWFGEQTRDYFDYW

SEQ ID NO: 57791 - protein, 19 aa, Homo sapiens
CAKELPNFTTYYYYGMDVW

SEQ ID NO: 57792 - protein, 16 aa, Homo sapiens
CARTLTMVRGVPDDYW

SEQ ID NO: 57793 - protein, 25 aa, Homo sapiens
CAKEILSSSGSGYDYNYYYYGMDVW

SEQ ID NO: 57794 - protein, 25 aa, Homo sapiens
CTTGIASLYYDILTGYSYYYGMDVW

SEQ ID NO: 57795 - protein, 18 aa, Homo sapiens
CARFLSSGWSDGGVFDPW

SEQ ID NO: 57796 - protein, 19 aa, Homo sapiens
CARLRPQNGDVSVFYFDFW

SEQ ID NO: 57797 - protein, 16 aa, Homo sapiens
CAREGGIAVTGCFDFW

SEQ ID NO: 57798 - protein, 17 aa, Homo sapiens
CARSYSYNSAPDAFDVW

SEQ ID NO: 57799 - protein, 18 aa, Homo sapiens
CARGPFWSWLVKQANDYW

SEQ ID NO: 57800 - protein, 17 aa, Homo sapiens
CVKDRYYFSSGSYLDSW

SEQ ID NO: 57801 - protein, 32 aa, Homo sapiens
CARDLLYYDSSGYRSPSTERGRVYYYYGMDVW

SEQ ID NO: 57802 - protein, 28 aa, Homo sapiens
CARVDGLRYFDWLSSGLSGTIEGWFDPW

SEQ ID NO: 57803 - protein, 23 aa, Homo sapiens
CAKEGTLLWFGEPIFTQRFFDYW

SEQ ID NO: 57804 - protein, 20 aa, Homo sapiens
CAKDRVTMIVVVIDRYFDYW

SEQ ID NO: 57805 - protein, 14 aa, Homo sapiens
CVRSYGSGRAFDYW

SEQ ID NO: 57806 - protein, 19 aa, Homo sapiens
CAHRPLLYSSGFTMGFDPW

SEQ ID NO: 57807 - protein, 17 aa, Homo sapiens
CAKDTRDGYNIGGIDYW

SEQ ID NO: 57808 - protein, 26 aa, Homo sapiens
CARNPDKYYYDSSGYLRDYYYGMDVW

SEQ ID NO: 57809 - protein, 21 aa, Homo sapiens
CAHRLRYTIYEGGGRYYFDHW

SEQ ID NO: 57810 - protein, 16 aa, Homo sapiens
CARFDNKGDIRSIDYW

SEQ ID NO: 57811 - protein, 18 aa, Homo sapiens
CARGPDGNYYGSGSLDYW

SEQ ID NO: 57812 - protein, 25 aa, Homo sapiens
CARPRTYYDILTGYFGGSRDAFDIW

SEQ ID NO: 57813 - protein, 18 aa, Homo sapiens
CAKNGPRGSLIMGDFDYW

SEQ ID NO: 57814 - protein, 25 aa, Homo sapiens
CARGEGGLRYFDWAGYYYYYGMDVW

SEQ ID NO: 57815 - protein, 24 aa, Homo sapiens
CARVGVYYDSSGYYYVFGNGFDYW

SEQ ID NO: 57816 - protein, 22 aa, Homo sapiens
CASIPHDYGDYATPYYYGMDVW

SEQ ID NO: 57817 - protein, 24 aa, Homo sapiens
CARVVFRGVAATPGAYYYYGMDVW

SEQ ID NO: 57818 - protein, 16 aa, Homo sapiens
CARGRWLQSSDAFDIW

SEQ ID NO: 57819 - protein, 22 aa, Homo sapiens
CAKDQDFVIVVVPAASAGIDYW

SEQ ID NO: 57820 - protein, 13 aa, Homo sapiens
CAREVPAAMVDYW

SEQ ID NO: 57821 - protein, 16 aa, Homo sapiens
CARDLGIGSYGYLGYW

SEQ ID NO: 57822 - protein, 15 aa, Homo sapiens
CARVISGWPPFNDYW

SEQ ID NO: 57823 - protein, 16 aa, Homo sapiens
CARTSSWLDEDAFDIW

SEQ ID NO: 57824 - protein, 15 aa, Homo sapiens
CARGSYSATVEFDYW

SEQ ID NO: 57825 - protein, 19 aa, Homo sapiens
CARDSPQVATISHDAFDFW

SEQ ID NO: 57826 - protein, 17 aa, Homo sapiens
CTSDYYDSSGERGSDYW

SEQ ID NO: 57827 - protein, 18 aa, Homo sapiens
CARESGWYAGATRDFDYW

SEQ ID NO: 57828 - protein, 17 aa, Homo sapiens
CAKSFRGYYDTTPFDYW

SEQ ID NO: 57829 - protein, 20 aa, Homo sapiens
CATDRSPPLWFGGSQGFDPW

SEQ ID NO: 57830 - protein, 18 aa, Homo sapiens
CVKDRHGSGLLTDAFDFW

SEQ ID NO: 57831 - protein, 14 aa, Homo sapiens
CAKGQGGWERVDYW

SEQ ID NO: 57832 - protein, 18 aa, Homo sapiens
CTGNVVVVAATPVLLDYW

SEQ ID NO: 57833 - protein, 23 aa, Homo sapiens
CARVNYYDSSGYYYSSYWYFDLW

SEQ ID NO: 57834 - protein, 21 aa, Homo sapiens
CARDQEANWDRSIYYYGMDVW

SEQ ID NO: 57835 - protein, 23 aa, Homo sapiens
CATAGQWLVRKNYYYYYYGMDVW

SEQ ID NO: 57836 - protein, 26 aa, Homo sapiens
CARLCLEVYYYDSSGYYYVLGGFDYW

SEQ ID NO: 57837 - protein, 19 aa, Homo sapiens
CAKYNGFSYGYGRYYFDYW

SEQ ID NO: 57838 - protein, 20 aa, Homo sapiens
CARDRSSGPPDYYYYGMDVW

SEQ ID NO: 57839 - protein, 16 aa, Homo sapiens
CAHRQASWFGTKGDYW

SEQ ID NO: 57840 - protein, 18 aa, Homo sapiens
CARRGLAYGGNSHGFDYW

SEQ ID NO: 57841 - protein, 17 aa, Homo sapiens
CARDAPSGDWGDYFDPW

SEQ ID NO: 57842 - protein, 16 aa, Homo sapiens
CARPHQWLVGAWFDPW

SEQ ID NO: 57843 - protein, 21 aa, Homo sapiens
CARARSRDDNGYYPPYYFDYW

SEQ ID NO: 57844 - protein, 24 aa, Homo sapiens
CARSSPTYYYGSGSYYIEWYFDYW

SEQ ID NO: 57845 - protein, 17 aa, Homo sapiens
CATGGYGVDTAMDVDYW

SEQ ID NO: 57846 - protein, 21 aa, Homo sapiens
CAKHYYDILTGYSDLEAFDIW

SEQ ID NO: 57847 - protein, 16 aa, Homo sapiens
CAKFADIAATGYFDYW

SEQ ID NO: 57848 - protein, 21 aa, Homo sapiens
CARDLPISGFNLQNHDAFDIW

SEQ ID NO: 57849 - protein, 18 aa, Homo sapiens
CAKYYITMIVGVDAFDIW

SEQ ID NO: 57850 - protein, 12 aa, Homo sapiens
CATETLRYFDYW

SEQ ID NO: 57851 - protein, 18 aa, Homo sapiens [sequence omitted]

SEQ ID NO: 57852 - protein, 14 aa, Homo sapiens
CGTWDSSLTVNWLF

SEQ ID NO: 57853 - protein, 16 aa, Homo sapiens
CASLFEMVRGVILDYW

SEQ ID NO: 57854 - protein, 23 aa, Homo sapiens
CAKDISSWYHSLSYYYYYGMDVW

SEQ ID NO: 57855 - protein, 25 aa, Homo sapiens
CARDLYYYGSGSHDDYYYYYGMDVW

SEQ ID NO: 57856 - protein, 26 aa, Homo sapiens
CARDGGSVDTAMDHPLYYYYYGMDVW

SEQ ID NO: 57857 - protein, 18 aa, Homo sapiens
CARRGRGYALWEDAFDIW

SEQ ID NO: 57858 - protein, 11 aa, Homo sapiens
CHSRDSSGKRF

SEQ ID NO: 57859 - protein, 23 aa, Homo sapiens
CARERDPIMITFGGVSENWFDPW

SEQ ID NO: 57860 - protein, 20 aa, Homo sapiens
CARGDQWLRTYYYYYGMDVW

SEQ ID NO: 57861 - protein, 19 aa, Homo sapiens
CVREGGRDHGEDRGTFDIW

SEQ ID NO: 57862 - protein, 22 aa, Homo sapiens
CAISFRSVSIFGVVSPGGLDYW

SEQ ID NO: 57863 - protein, 25 aa, Homo sapiens
CARGSGRLSGGYSYAEYYYYGMDVW

SEQ ID NO: 57864 - protein, 21 aa, Homo sapiens
CARDLPIYSYGYEGADAFDIW

SEQ ID NO: 57865 - protein, 17 aa, Homo sapiens
CARGSLGGSYFNGFDYW

SEQ ID NO: 57866 - protein, 19 aa, Homo sapiens
CARALGFLWFGELLSFDYW

SEQ ID NO: 57867 - protein, 18 aa, Homo sapiens
CARYPNVGASQAGAFDIW

SEQ ID NO: 57868 - protein, 20 aa, Homo sapiens
CAREGLEMATIPVNWYFDLW

SEQ ID NO: 57869 - protein, 17 aa, Homo sapiens
CAKGSSSWYVFILFDYW

SEQ ID NO: 57870 - protein, 17 aa, Homo sapiens
CAKDYSSGWYWYPFDYW

SEQ ID NO: 57871 - protein, 20 aa, Homo sapiens
CAGVSAMLRDYYYYYGMDVW

SEQ ID NO: 57872 - protein, 17 aa, Homo sapiens
CARSYDYVWVGSNFDYW

SEQ ID NO: 57873 - protein, 17 aa, Homo sapiens
CARGLWFGESPDAFDIW

SEQ ID NO: 57874 - protein, 20 aa, Homo sapiens
CASEFIPILGSSWYSWFDPW

SEQ ID NO: 57875 - protein, 15 aa, Homo sapiens
CARVGVTPGYYFDYW

SEQ ID NO: 57876 - protein, 14 aa, Homo sapiens
CAGDHDYGDYEGYW

SEQ ID NO: 57877 - protein, 16 aa, Homo sapiens
CARWSSSWDNGIFDYW

SEQ ID NO: 57878 - protein, 17 aa, Homo sapiens
CARLNYGSGSYQVFDFW

SEQ ID NO: 57879 - protein, 16 aa, Homo sapiens
CANHISLHSSGWKDYW

SEQ ID NO: 57880 - protein, 20 aa, Homo sapiens
CTTDSYCGGDCYSWAYFDYW

SEQ ID NO: 57881 - protein, 15 aa, Homo sapiens
CATELVVVNPRRDYW

SEQ ID NO: 57882 - protein, 16 aa, Homo sapiens
CARDFGRGQNRMIDYW

SEQ ID NO: 57883 - protein, 20 aa, Homo sapiens
CARGLGATTDGYYYYGMDVW

SEQ ID NO: 57884 - protein, 17 aa, Homo sapiens
CARVSWGSSWETPFDYW

SEQ ID NO: 57885 - protein, 14 aa, Homo sapiens
CARIGWVRGEIDYW

SEQ ID NO: 57886 - protein, 15 aa, Homo sapiens
CAKARITVAGALDYW

SEQ ID NO: 57887 - protein, 19 aa, Homo sapiens
CAKEPNGYGYSYGNHFDYW

SEQ ID NO: 57888 - protein, 18 aa, Homo sapiens
CAKDREQQLLLAGYFDYW

SEQ ID NO: 57889 - protein, 23 aa, Homo sapiens
CAREKIVVVPADNYYYYYGMDVW

SEQ ID NO: 57890 - protein, 13 aa, Homo sapiens
CQSADNIGLHWVF

SEQ ID NO: 57891 - protein, 18 aa, Homo sapiens
CARGGSGDTAIDNWFDPW

SEQ ID NO: 57892 - protein, 11 aa, Homo sapiens
CASIAGTFDYW

SEQ ID NO: 57893 - protein, 16 aa, Homo sapiens
CATSPAVRTGAPPDYW

SEQ ID NO: 57894 - protein, 17 aa, Homo sapiens
CARDLYSGNYVGPFDIW

SEQ ID NO: 57895 - protein, 23 aa, Homo sapiens
CANHDYGDYANPKFYYYYGMDVW

SEQ ID NO: 57896 - protein, 17 aa, Homo sapiens
CARSISPSMVRGHFDYW

SEQ ID NO: 57897 - protein, 20 aa, Homo sapiens
CAKDHAPGSYDSSGTSGDYW

SEQ ID NO: 57898 - protein, 21 aa, Homo sapiens
CARGPCSSTSCYAMNDAFDIW

SEQ ID NO: 57899 - protein, 15 aa, Homo sapiens
CAKFLGLGGHPFDYW

SEQ ID NO: 57900 - protein, 28 aa, Homo sapiens
CARAAQSKGAEWFGELLGATTDWYFDLW

SEQ ID NO: 57901 - protein, 12 aa, Homo sapiens
CQQYYSAHTWTF

SEQ ID NO: 57902 - protein, 23 aa, Homo sapiens
CARDHTNTSPNDDYYYYYGMDVW

SEQ ID NO: 57903 - protein, 22 aa, Homo sapiens
CARSGVAVAGAAGYYYYGMDVW

SEQ ID NO: 57904 - protein, 14 aa, Homo sapiens
CVRGNYYLYAFDIW

SEQ ID NO: 57905 - protein, 19 aa, Homo sapiens
CAREVTRFNYYYYYGMDVW

SEQ ID NO: 57906 - protein, 23 aa, Homo sapiens
CASTSGWVHCSSTSCYTNWFDPW

SEQ ID NO: 57907 - protein, 20 aa, Homo sapiens
CARGIKGGSGGSCYSGFVYW

SEQ ID NO: 57908 - protein, 22 aa, Homo sapiens
CTRDPALMTTVTTSPLYYFDYW

SEQ ID NO: 57909 - protein, 20 aa, Homo sapiens
CARDKDGSSWTKAPYYFDYW

SEQ ID NO: 57910 - protein, 16 aa, Homo sapiens
CASSYGDYDQCWFDPW

SEQ ID NO: 57911 - protein, 23 aa, Homo sapiens
CAKSQNYYDSSGYYSLGWYFDLW

SEQ ID NO: 57912 - protein, 21 aa, Homo sapiens
CAKFSGYSSGWYGVGNNFDYW

SEQ ID NO: 57913 - protein, 19 aa, Homo sapiens
CARTNIVVVTARTPNFDYW

SEQ ID NO: 57914 - protein, 18 aa, Homo sapiens
CARETQDYDGSNYYYDLW

SEQ ID NO: 57915 - protein, 15 aa, Homo sapiens
CARSGGWPNWYFDLW

SEQ ID NO: 57916 - protein, 18 aa, Homo sapiens
CAKTSSQALWLRGYFDYW

SEQ ID NO: 57917 - protein, 14 aa, Homo sapiens
CQVWDTSSDQREVF

SEQ ID NO: 57918 - protein, 22 aa, Homo sapiens
CARGYVEMATKLMATPGHFDYW

SEQ ID NO: 57919 - protein, 23 aa, Homo sapiens
CARGQLERPETDDYYYYYGMDVW

SEQ ID NO: 57920 - protein, 22 aa, Homo sapiens
CARGRDYGIKGTYYYYYGMDVW

SEQ ID NO: 57921 - protein, 17 aa, Homo sapiens
CAKDLTAMSYGDQFDYW

SEQ ID NO: 57922 - protein, 19 aa, Homo sapiens
CARAQAVVGSSSWYGVDYW

SEQ ID NO: 57923 - protein, 15 aa, Homo sapiens
CAKDKDGSGRAYDYW

SEQ ID NO: 57924 - protein, 17 aa, Homo sapiens
CARQLMSGSAPDAFDVW

SEQ ID NO: 57925 - protein, 18 aa, Homo sapiens
CASSRAPLRYFDWLFDYW

SEQ ID NO: 57926 - protein, 16 aa, Homo sapiens
CAGHGYFDWLSSFDYW

SEQ ID NO: 57927 - protein, 15 aa, Homo sapiens
CARVSYNRRQPFDYW

SEQ ID NO: 57928 - protein, 15 aa, Homo sapiens
CAKDRPGGALPIDYW

SEQ ID NO: 57929 - protein, 17 aa, Homo sapiens
CARTLMPTIGHYALDVW

SEQ ID NO: 57930 - protein, 20 aa, Homo sapiens
CARETGYDILTGYSGYFDYW

SEQ ID NO: 57931 - protein, 19 aa, Homo sapiens
CASGGDSPQMYYYYGMDVW

SEQ ID NO: 57932 - protein, 15 aa, Homo sapiens
CARIQALKGGSADYW

SEQ ID NO: 57933 - protein, 39 aa, Homo sapiens
CTAYMELSSLRSEDTAVYYCARVHGWLRSRNVNGAFDIW

SEQ ID NO: 57934 - protein, 22 aa, Homo sapiens
CASVADYGSGVIHYYYYGMDVW

SEQ ID NO: 57935 - protein, 15 aa, Homo sapiens
CARTSLSRGVAYDYW

SEQ ID NO: 57936 - protein, 17 aa, Homo sapiens
CARDQAENWNDNWFDPW

SEQ ID NO: 57937 - protein, 19 aa, Homo sapiens
CARDRDGSFPGGDYYFDYW

SEQ ID NO: 57938 - protein, 18 aa, Homo sapiens
CARGSGSGWFGSRYFQHW

SEQ ID NO: 57939 - protein, 12 aa, Homo sapiens
CVSDLGWYDDCW

SEQ ID NO: 57940 - protein, 17 aa, Homo sapiens
CARMRPDIQLWYYFDIW

SEQ ID NO: 57941 - protein, 12 aa, Homo sapiens
CATDARTIIDYW

SEQ ID NO: 57942 - protein, 18 aa, Homo sapiens
CARDPLAVVAATRGIDYW

SEQ ID NO: 57943 - protein, 15 aa, Homo sapiens
CARRQEWELLPFDFW

SEQ ID NO: 57944 - protein, 13 aa, Homo sapiens
CQQYDNLLGIFTF

SEQ ID NO: 57945 - protein, 21 aa, Homo sapiens
CAITTPTMVRGVIIDWYFDLW

SEQ ID NO: 57946 - protein, 16 aa, Homo sapiens
CATGRVGYSYGFFDYW

SEQ ID NO: 57947 - protein, 23 aa, Homo sapiens
CARDPTLPVGQWLVFGSNYYDCW

SEQ ID NO: 57948 - protein, 16 aa, Homo sapiens
CAKGTGYSYFSYFDYW

SEQ ID NO: 57949 - protein, 18 aa, Homo sapiens
CAHKGSNLGYYYYGMDVW

SEQ ID NO: 57950 - protein, 22 aa, Homo sapiens
CARDGVSFVGDSYSYYYGMDVW

SEQ ID NO: 57951 - protein, 15 aa, Homo sapiens
CASSGDGYNFLFDYW

SEQ ID NO: 57952 - protein, 28 aa, Homo sapiens
CAKVPRGGHYYGSGSYYNVYYYYGMDVW

SEQ ID NO: 57953 - protein, 22 aa, Homo sapiens
CTTEAHGDYDYGDYVIMAFDYW

SEQ ID NO: 57954 - protein, 18 aa, Homo sapiens
CARVYPNRLYGSGKVDYW

SEQ ID NO: 57955 - protein, 21 aa, Homo sapiens
CAKDPNVLLWFGELWDWFDPW

SEQ ID NO: 57956 - protein, 13 aa, Homo sapiens
CAKDILRWAFDYW

SEQ ID NO: 57957 - protein, 18 aa, Homo sapiens
CARHPGIVVTGTGGIDYW

SEQ ID NO: 57958 - protein, 27 aa, Homo sapiens
CARWPYRRNIVVVPAAIVGYYYGMDVW

SEQ ID NO: 57959 - protein, 15 aa, Homo sapiens
CATASGLVRKLFDYW

SEQ ID NO: 57960 - protein, 15 aa, Homo sapiens
CAKDIYGDSTVFDYW

SEQ ID NO: 57961 - protein, 21 aa, Homo sapiens
CARTGFTMVRGVSLNNWFDPW

SEQ ID NO: 57962 - protein, 23 aa, Homo sapiens
CARVGGTVVRGVVVYYYHGMDVW

SEQ ID NO: 57963 - protein, 21 aa, Homo sapiens
CARDRSAGNYYETRYNWFDPW

SEQ ID NO: 57964 - protein, 19 aa, Homo sapiens
CAKDMGSGVSYYYFGMDVW

SEQ ID NO: 57965 - protein, 17 aa, Homo sapiens
CARSPPLAVADVWFDPW

SEQ ID NO: 57966 - protein, 19 aa, Homo sapiens
CAKSFRGYSGYDYDYFDYW

SEQ ID NO: 57967 - protein, 20 aa, Homo sapiens
CARDSFHGSSALYYYGMDVW

SEQ ID NO: 57968 - protein, 16 aa, Homo sapiens
CARDGGIGDSSGLDYW

SEQ ID NO: 57969 - protein, 15 aa, Homo sapiens
CAREAVVVIPNFDYW

SEQ ID NO: 57970 - protein, 16 aa, Homo sapiens
CVRWGGVVGAPPSDYW

SEQ ID NO: 57971 - protein, 22 aa, Homo sapiens
CARDAVTTQGDQTYYYYGMDVW

SEQ ID NO: 57972 - protein, 21 aa, Homo sapiens
CARRALWGSNGYNNPYYFDYW

SEQ ID NO: 57973 - protein, 18 aa, Homo sapiens
CARPGSGYDSGWYGFDSW

SEQ ID NO: 57974 - protein, 23 aa, Homo sapiens
CARRGESVVVTGLTNPHWYFDLW

SEQ ID NO: 57975 - protein, 24 aa, Homo sapiens
CAKDWVDNSSGWYEGSYYYGMDVW

SEQ ID NO: 57976 - protein, 16 aa, Homo sapiens
CARSAGYSSSWAFDYW

SEQ ID NO: 57977 - protein, 17 aa, Homo sapiens
CAREGVDGYRRTAFDYW

SEQ ID NO: 57978 - protein, 18 aa, Homo sapiens
CARVGYSSGWRYWYFDLW

SEQ ID NO: 57979 - protein, 28 aa, Homo sapiens
CAKDPANRWYDILTGYSTTYYYYGMDVW

SEQ ID NO: 57980 - protein, 24 aa, Homo sapiens
CARLRGGGQTSRGEYYYYYGMDVW

SEQ ID NO: 57981 - protein, 17 aa, Homo sapiens
CARGLVGATGNNWFDPW

SEQ ID NO: 57982 - protein, 17 aa, Homo sapiens
CARSSGWYRTITHFDYW

SEQ ID NO: 57983 - protein, 23 aa, Homo sapiens
CARVVVVTAPADDYYYYYGMDVW

SEQ ID NO: 57984 - protein, 19 aa, Homo sapiens
CARGRPPMVRGVYNWFDPW

SEQ ID NO: 57985 - protein, 21 aa, Homo sapiens
CATHRGFYYGSGSYYNGLDYW

SEQ ID NO: 57986 - protein, 24 aa, Homo sapiens
CARERRDILTGYYRYYYYYGMDVW

SEQ ID NO: 57987 - protein, 18 aa, Homo sapiens
CARLGRFHPRIVYAFDIW

SEQ ID NO: 57988 - protein, 25 aa, Homo sapiens
CAHSLTENYYDSSGYYYKEGGLDYW

SEQ ID NO: 57989 - protein, 20 aa, Homo sapiens
CARELLWFGELLIGDAFDIW

SEQ ID NO: 57990 - protein, 21 aa, Homo sapiens
CARSVGSSWYQSYYYYGMDVW

SEQ ID NO: 57991 - protein, 25 aa, Homo sapiens
CASMPRSTNSKFLVGVYYYYKMDVW

SEQ ID NO: 57992 - protein, 18 aa, Homo sapiens
CAKAVYSYGANWGYFDYW

SEQ ID NO: 57993 - protein, 14 aa, Homo sapiens
CVTGRLVAGAFHYW

SEQ ID NO: 57994 - protein, 16 aa, Homo sapiens
CARWVVPAADNWFDPW

SEQ ID NO: 57995 - protein, 13 aa, Homo sapiens
CAKVSPLGDHDYW

SEQ ID NO: 57996 - protein, 25 aa, Homo sapiens
CASRLYSSGWLGVPDYYYYYGMDVW

SEQ ID NO: 57997 - protein, 25 aa, Homo sapiens
CTTDRLLYDYDILTGYYKKPGNDYW

SEQ ID NO: 57998 - protein, 18 aa, Homo sapiens
CARDRSLGFGGLLPFDYW

SEQ ID NO: 57999 - protein, 24 aa, Homo sapiens
CARDLGSLQLWPAPDYYYYGMDVW

SEQ ID NO: 58000 - protein, 25 aa, Homo sapiens
CAATEPPLYDYVWGSYRPKGLHDYW

SEQ ID NO: 58001 - protein, 15 aa, Homo sapiens
CAKGWSEAAPPFDIW

SEQ ID NO: 58002 - protein, 13 aa, Homo sapiens
CARGTETGAIDIW

SEQ ID NO: 58003 - protein, 19 aa, Homo sapiens
CAKLVGFGEFSNLYYFDYW

SEQ ID NO: 58004 - protein, 19 aa, Homo sapiens
CAREDFDILTNIVYGFDIW

SEQ ID NO: 58005 - protein, 19 aa, Homo sapiens
CATMNDRNWNDPENWFDPW

SEQ ID NO: 58006 - protein, 18 aa, Homo sapiens
CAREIYSSSWSDFYFDYW

SEQ ID NO: 58007 - protein, 16 aa, Homo sapiens
CAHSPHPSGWFYFDSW

SEQ ID NO: 58008 - protein, 19 aa, Homo sapiens
CAKDVAPVRGVIIPIFDYW

SEQ ID NO: 58009 - protein, 22 aa, Homo sapiens
CAKSDSGGAIVVVMSNIYFDSW

SEQ ID NO: 58010 - protein, 20 aa, Homo sapiens
CARGLRGYSYGPPEFRFDPW

SEQ ID NO: 58011 - protein, 15 aa, Homo sapiens
CPIVVVTAAQPFDYW

SEQ ID NO: 58012 - protein, 24 aa, Homo sapiens
CAKDIVVVPAANTETYYYYGMDVW

SEQ ID NO: 58013 - protein, 22 aa, Homo sapiens
CARSPRNGYTSGHSWDWYFDIW

SEQ ID NO: 58014 - protein, 16 aa, Homo sapiens
CARTSTSRFLEAFDIW

SEQ ID NO: 58015 - protein, 23 aa, Homo sapiens
CARVVRLLWFGELSTNDYYFDYW

SEQ ID NO: 58016 - protein, 19 aa, Homo sapiens
CARQDRSTWYESGGWFDPW

SEQ ID NO: 58017 - protein, 22 aa, Homo sapiens
CARSVNEGLLWFGEARDAFDIW

SEQ ID NO: 58018 - protein, 19 aa, Homo sapiens
CAREPHCSGGSCLHYFDYW

SEQ ID NO: 58019 - protein, 21 aa, Homo sapiens
CARDYYDNRPGGYYYYGMDVW

SEQ ID NO: 58020 - protein, 18 aa, Homo sapiens
CARDDIVGASPTFDFDYW

SEQ ID NO: 58021 - protein, 20 aa, Homo sapiens
CARHNRRGSGSPLYDPLDYW

SEQ ID NO: 58022 - protein, 16 aa, Homo sapiens
CVTKRGDASRWNEDYW

SEQ ID NO: 58023 - protein, 25 aa, Homo sapiens
CARDEMVYDSSGYYLFYYYYGMDVW

SEQ ID NO: 58024 - protein, 16 aa, Homo sapiens
CARDPADSGDMYFDYW

SEQ ID NO: 58025 - protein, 18 aa, Homo sapiens
CAKDSSRWYDPGGYFEDW

SEQ ID NO: 58026 - protein, 16 aa, Homo sapiens
CAHRKMVPPLDAFDIW

SEQ ID NO: 58027 - protein, 21 aa, Homo sapiens
CARDYWSTSSFYYYYYGMDVW

SEQ ID NO: 58028 - protein, 24 aa, Homo sapiens
CARERRGIQLWPAPQQYYYGMDVW

SEQ ID NO: 58029 - protein, 20 aa, Homo sapiens
CATGAPHCSSTSCLWWFDPW

SEQ ID NO: 58030 - protein, 16 aa, Homo sapiens
CARETAGIAAAGLDYW

SEQ ID NO: 58031 - protein, 23 aa, Homo sapiens
CAKAMDVAAAGTVGYYYYGMDVW

SEQ ID NO: 58032 - protein, 19 aa, Homo sapiens
CARFPVRGYTFYYYGMDVW

SEQ ID NO: 58033 - protein, 18 aa, Homo sapiens
CARDGRLEELEQWPFDPW

SEQ ID NO: 58034 - protein, 16 aa, Homo sapiens
CARDATTVAGYFFDYW

SEQ ID NO: 58035 - protein, 17 aa, Homo sapiens
CARELTWIQAPTGFGYW

SEQ ID NO: 58036 - protein, 26 aa, Homo sapiens
CARAGYSRTSSGYFLDAYWGDYFDYW

SEQ ID NO: 58037 - protein, 16 aa, Homo sapiens
CAKGGIMGDYGPFDRW

SEQ ID NO: 58038 - protein, 24 aa, Homo sapiens
CASSGFGELLSGLWNYYYYGMDVW

SEQ ID NO: 58039 - protein, 17 aa, Homo sapiens
CARPKMATILIGAFDIW

SEQ ID NO: 58040 - protein, 20 aa, Homo sapiens
CARHGFSGQWLVHEGWFDPW

SEQ ID NO: 58041 - protein, 19 aa, Homo sapiens
CARSHYDILTGVSIPFDYW

SEQ ID NO: 58042 - protein, 18 aa, Homo sapiens
CAREWEADCSGGSCTDYW

SEQ ID NO: 58043 - protein, 19 aa, Homo sapiens
CARTNVHVAVAGLWYFDYW

SEQ ID NO: 58044 - protein, 21 aa, Homo sapiens
CARRQITLVQGLIRAYYFDYW

SEQ ID NO: 58045 - protein, 13 aa, Homo sapiens
CTTEEAAAGFDYW

SEQ ID NO: 58046 - protein, 13 aa, Homo sapiens
CQQRNYWPYMYSF

SEQ ID NO: 58047 - protein, 21 aa, Homo sapiens
CARDLTPTAAGTNYYYGMDVW

SEQ ID NO: 58048 - protein, 26 aa, Homo sapiens
CARDINGVDSSSWYDWGRGDGYFDYW

SEQ ID NO: 58049 - protein, 23 aa, Homo sapiens
CARVQSLLGYDSSGYYPYYFDYW

SEQ ID NO: 58050 - protein, 10 aa, Homo sapiens
CMQGINLQSF

SEQ ID NO: 58051 - protein, 27 aa, Homo sapiens
CARDLLLSNQNGDRTEILWYYYGMDVW

SEQ ID NO: 58052 - protein, 21 aa, Homo sapiens
CARTSGWYRRTYYYYYGMDVW

SEQ ID NO: 58053 - protein, 12 aa, Homo sapiens
CCSFTSSSTLLF

SEQ ID NO: 58054 - protein, 16 aa, Homo sapiens
CARLYTYYLSYYFDYW

SEQ ID NO: 58055 - protein, 19 aa, Homo sapiens
CAIGRGSSTSWGADWFDPW

SEQ ID NO: 58056 - protein, 17 aa, Homo sapiens
CARDPVGYYYGSTPDYW

SEQ ID NO: 58057 - protein, 19 aa, Homo sapiens
CSGSGGEGDYYYYYGMDVW

SEQ ID NO: 58058 - protein, 18 aa, Homo sapiens
CARDRWVKWLVLDAFDIW

SEQ ID NO: 58059 - protein, 17 aa, Homo sapiens
CARVRGAYYKRLAFDIW

SEQ ID NO: 58060 - protein, 17 aa, Homo sapiens
CAKDLSFQPPLNYFDPW

SEQ ID NO: 58061 - protein, 18 aa, Homo sapiens
CARELTYYYDSSGYFDIW

SEQ ID NO: 58062 - protein, 13 aa, Homo sapiens
CVGGTMVRGVDYW

SEQ ID NO: 58063 - protein, 15 aa, Homo sapiens
CAKDSSYEHRGIDYW

SEQ ID NO: 58064 - protein, 18 aa, Homo sapiens
CARHFQVATVTTMGFDYW

SEQ ID NO: 58065 - protein, 16 aa, Homo sapiens
CARDYSSSPYKEADYW

SEQ ID NO: 58066 - protein, 21 aa, Homo sapiens
CAIRGSYCSGGSCYHEYFQYW

SEQ ID NO: 58067 - protein, 19 aa, Homo sapiens
CAHGGYSSGWGPIARFDYW

SEQ ID NO: 58068 - protein, 24 aa, Homo sapiens
CATNPGYCSSTSCKPYYYYGMDVW

SEQ ID NO: 58069 - protein, 19 aa, Homo sapiens
CARTGPTGYFDWLNSFDYW

SEQ ID NO: 58070 - protein, 15 aa, Homo sapiens
CATRHWGFYTDFDYW

SEQ ID NO: 58071 - protein, 14 aa, Homo sapiens
CARIRAATLGFDPW

SEQ ID NO: 58072 - protein, 18 aa, Homo sapiens
CARSQVRYYYDRRWFDPW

SEQ ID NO: 58073 - protein, 24 aa, Homo sapiens
CARAPRGYYDSSGYYHKPEYFQHW

SEQ ID NO: 58074 - protein, 17 aa, Homo sapiens
CAGHYGYSSGWSEVDYW

SEQ ID NO: 58075 - protein, 14 aa, Homo sapiens
CARRMIASQLFDLW

SEQ ID NO: 58076 - protein, 18 aa, Homo sapiens
CAKSLYSYGYAGAPNDYW

SEQ ID NO: 58077 - protein, 14 aa, Homo sapiens
CANPWLSKGAFDLW

SEQ ID NO: 58078 - protein, 29 aa, Homo sapiens
CAKDIGYYGSGSYYNEIHRYYYYYGMDVW

SEQ ID NO: 58079 - protein, 18 aa, Homo sapiens
CATDRSGDTPAGNWFDPW

SEQ ID NO: 58080 - protein, 21 aa, Homo sapiens
CARPLLSGSEIYYRDDAFHIW

SEQ ID NO: 58081 - protein, 15 aa, Homo sapiens
CARVTTDYGGIFDLW

SEQ ID NO: 58082 - protein, 18 aa, Homo sapiens
CARGVPGGYGLAYYFDYW

SEQ ID NO: 58083 - protein, 20 aa, Homo sapiens
CARGHYDSSGYPPANWFDPW

SEQ ID NO: 58084 - protein, 19 aa, Homo sapiens
CAKDEIDTIGLGAPAFDIW

SEQ ID NO: 58085 - protein, 21 aa, Homo sapiens
CARGHRVEVAGIRFPRGFDPW

SEQ ID NO: 58086 - protein, 17 aa, Homo sapiens
CAKKPRPWFGEDPFDYW

SEQ ID NO: 58087 - protein, 20 aa, Homo sapiens
CARDTPTPQSSWYVGYFDLW

SEQ ID NO: 58088 - protein, 12 aa, Homo sapiens
CAKALPAVFDYW

SEQ ID NO: 58089 - protein, 21 aa, Homo sapiens
CARERTVTTFFRLQYNWFDPW

SEQ ID NO: 58090 - protein, 19 aa, Homo sapiens
CAKVIMITFGGVPPLFDPW

SEQ ID NO: 58091 - protein, 17 aa, Homo sapiens
CAKVGHDYADYDAFDIW

SEQ ID NO: 58092 - protein, 16 aa, Homo sapiens
CARGEGSYRSNSFDPW

SEQ ID NO: 58093 - protein, 20 aa, Homo sapiens
CARDHPYSSWYYYYYVMDVW

SEQ ID NO: 58094 - protein, 25 aa, Homo sapiens
CARDIVVVPAAMYEQKYYYYGMDVW

SEQ ID NO: 58095 - protein, 18 aa, Homo sapiens
CAREATVGGSYEYYFDNW

SEQ ID NO: 58096 - protein, 22 aa, Homo sapiens
CAREVRCSGGSCYPMGRHFDYW

SEQ ID NO: 58097 - protein, 24 aa, Homo sapiens
CARDSVKNDGGPLGRYYYYGMDVW

SEQ ID NO: 58098 - protein, 24 aa, Homo sapiens
CARDLYGLDLFGELPRSYWYFDLW

SEQ ID NO: 58099 - protein, 17 aa, Homo sapiens
CASHYGDYGDYWYFDLW

SEQ ID NO: 58100 - protein, 23 aa, Homo sapiens
CARAGLDIVATIFVGAWFYFDYW

SEQ ID NO: 58101 - protein, 16 aa, Homo sapiens
CAKDMKPFDWNEVDYW

SEQ ID NO: 58102 - protein, 24 aa, Homo sapiens
CARVASDELRYFDWLEALGAFDIW

SEQ ID NO: 58103 - protein, 20 aa, Homo sapiens
CARKGIYTSGRAVPWYFDLW

SEQ ID NO: 58104 - protein, 15 aa, Homo sapiens
CAHRPGSGWYFFDFW

SEQ ID NO: 58105 - protein, 27 aa, Homo sapiens
CARGSYFYVDLTYYYGSGSYGEYFDYW

SEQ ID NO: 58106 - protein, 32 aa, Homo sapiens
CARDHPQYCSGGSCYSWLWLHGATYYYGMDVW

SEQ ID NO: 58107 - protein, 15 aa, Homo sapiens
CATALKWEQSAPDYW

SEQ ID NO: 58108 - protein, 17 aa, Homo sapiens
CAKDIGQWLDEYFFDSW

SEQ ID NO: 58109 - protein, 17 aa, Homo sapiens
CAKSAPLGVIMGYFDYW

SEQ ID NO: 58110 - protein, 21 aa, Homo sapiens
CSKLTGYTMSWFDRHDAYDIW

SEQ ID NO: 58111 - protein, 20 aa, Homo sapiens
CAKDKVYYYAYPTLNYFDYW

SEQ ID NO: 58112 - protein, 25 aa, Homo sapiens
CAKDLWGEGGSAVADYYYYYGMDVW

SEQ ID NO: 58113 - protein, 17 aa, Homo sapiens
CARDFGWLLNGGAFDIW

SEQ ID NO: 58114 - protein, 19 aa, Homo sapiens
CATDSLEGIAAADYYFDYW

SEQ ID NO: 58115 - protein, 17 aa, Homo sapiens
CATAGDKSGWYTWFHSW

SEQ ID NO: 58116 - protein, 20 aa, Homo sapiens
CAREFHDMVRGVILYYFDYW

SEQ ID NO: 58117 - protein, 21 aa, Homo sapiens
CARTPGTLPGAYYYYYGMDVW

SEQ ID NO: 58118 - protein, 13 aa, Homo sapiens
CQHYNSWPPQSAF

SEQ ID NO: 58119 - protein, 23 aa, Homo sapiens
CARHGPYYYDSSGYWKLNWFDPW

SEQ ID NO: 58120 - protein, 23 aa, Homo sapiens
CARVSVVVAATPGVYYYYGMDVW

SEQ ID NO: 58121 - protein, 19 aa, Homo sapiens
CASHRRSGAHYTGDAFDIW

SEQ ID NO: 58122 - protein, 19 aa, Homo sapiens
CAKERIPMIGGFGGLFDSW

SEQ ID NO: 58123 - protein, 16 aa, Homo sapiens
CAHQELYSSSRPFDYW

SEQ ID NO: 58124 - protein, 13 aa, Homo sapiens
CMQGLQVPPMYTF

SEQ ID NO: 58125 - protein, 20 aa, Homo sapiens
CARGPTYYYDSSGLPDFDIW

SEQ ID NO: 58126 - protein, 21 aa, Homo sapiens
CARAAVTGGSGIYYYYGMDVW

SEQ ID NO: 58127 - protein, 17 aa, Homo sapiens
CAKSSSWSTLDYYFDYW

SEQ ID NO: 58128 - protein, 22 aa, Homo sapiens
CAREVVVPAAILEFYYYGMDVW

SEQ ID NO: 58129 - protein, 31 aa, Homo sapiens
CAKDELFQYDSSGYYYPLGLANYYYYGMDVW

SEQ ID NO: 58130 - protein, 18 aa, Homo sapiens
CARGGWSGGSFPLYFDYW

SEQ ID NO: 58131 - protein, 17 aa, Homo sapiens
CARQREAAAASDTFDIW

SEQ ID NO: 58132 - protein, 22 aa, Homo sapiens
CAKEDDSGWYRFSSGLNAFDIW

SEQ ID NO: 58133 - protein, 19 aa, Homo sapiens
CAKWGGGGWYFYYYGMDVW

SEQ ID NO: 58134 - protein, 23 aa, Homo sapiens
CARFGFTMVRGVIIHYYYGMDVW

SEQ ID NO: 58135 - protein, 19 aa, Homo sapiens
CARDHPYRYGGNSGLPDYW

SEQ ID NO: 58136 - protein, 19 aa, Homo sapiens
CAKDAVGVVAATPYYFDYW

SEQ ID NO: 58137 - protein, 21 aa, Homo sapiens
CAREVYDILTGLRGVNWFDPW

SEQ ID NO: 58138 - protein, 23 aa, Homo sapiens
CARDGQPAGDGYNVGSYWYFDLW

SEQ ID NO: 58139 - protein, 22 aa, Homo sapiens
CARQVGQWLAHGIYYYYGMDVW

SEQ ID NO: 58140 - protein, 19 aa, Homo sapiens
CARDPPLWGEPVPYYFDYW

SEQ ID NO: 58141 - protein, 23 aa, Homo sapiens
CARSAIILMITFGGVSGGSLDYW

SEQ ID NO: 58142 - protein, 16 aa, Homo sapiens
CAKDGDFDWFPLFDYW

SEQ ID NO: 58143 - protein, 21 aa, Homo sapiens
CAREILSYYDTTNFSNWLDPW

SEQ ID NO: 58144 - protein, 16 aa, Homo sapiens
CAREGTVVENSGFDYW

SEQ ID NO: 58145 - protein, 17 aa, Homo sapiens
CARAFIYGDYVDYFDCW

SEQ ID NO: 58146 - protein, 18 aa, Homo sapiens
CARFYVDTAMAELGFDYW

SEQ ID NO: 58147 - protein, 14 aa, Homo sapiens
CQQFNSYPHPLFTF

SEQ ID NO: 58148 - protein, 19 aa, Homo sapiens
CARVGRGTMTFYYYGMDVW

SEQ ID NO: 58149 - protein, 20 aa, Homo sapiens
CARDGIAHGGETYYYGMDVW

SEQ ID NO: 58150 - protein, 19 aa, Homo sapiens
CAREGMVVTAIPNWYFDLW

SEQ ID NO: 58151 - protein, 12 aa, Homo sapiens
CANGANSPFDYW

SEQ ID NO: 58152 - protein, 17 aa, Homo sapiens
CAREAVAGTWTTYLDYW

SEQ ID NO: 58153 - protein, 18 aa, Homo sapiens
CARLWKTGPITSLAFDYW

SEQ ID NO: 58154 - protein, 21 aa, Homo sapiens
CARDLNYCSSTSCFHRLFDYW

SEQ ID NO: 58155 - protein, 25 aa, Homo sapiens
CARKKTPYDSSGYYYQLADWYFDLW

SEQ ID NO: 58156 - protein, 16 aa, Homo sapiens
CARDRDDSSGYYYYYW

SEQ ID NO: 58157 - protein, 22 aa, Homo sapiens
CAKGLLLRWLQTNYYYYGMDVW

SEQ ID NO: 58158 - protein, 24 aa, Homo sapiens
CAKDFREVPAANKTTYYYYGMDVW

SEQ ID NO: 58159 - protein, 17 aa, Homo sapiens
CTYYYGSGSYYSSIDYW

SEQ ID NO: 58160 - protein, 23 aa, Homo sapiens
CARLKVTLGVTDDYYYYYGMDVW

SEQ ID NO: 58161 - protein, 23 aa, Homo sapiens
CARDYDILTGYYLEGSFDAFDIW

SEQ ID NO: 58162 - protein, 16 aa, Homo sapiens
CAFSHPFSAAYYFDYW

SEQ ID NO: 58163 - protein, 18 aa, Homo sapiens
CASAVDSIAASWQGFDYW

SEQ ID NO: 58164 - protein, 21 aa, Homo sapiens
CARDGEIVVRGVGLYNWFDSW

SEQ ID NO: 58165 - protein, 21 aa, Homo sapiens
CARDVVYDSSGYYDHDAFDIW

SEQ ID NO: 58166 - protein, 17 aa, Homo sapiens
CATLKGGVTLVRSGDYW

SEQ ID NO: 58167 - protein, 23 aa, Homo sapiens
CARRGTLDCSGGSCFWWGWFDPW

SEQ ID NO: 58168 - protein, 19 aa, Homo sapiens
CARDSSTYYFGSKSYLDYW

SEQ ID NO: 58169 - protein, 20 aa, Homo sapiens
CAKGGDDSSGYYYPYYFDYW

SEQ ID NO: 58170 - protein, 19 aa, Homo sapiens
CAKGGGLATMVRGVFFDHW

SEQ ID NO: 58171 - protein, 17 aa, Homo sapiens
CATGSSSWYSANYFDYW

SEQ ID NO: 58172 - protein, 20 aa, Homo sapiens
CARSNGFGELLSFSDWFDPW

SEQ ID NO: 58173 - protein, 24 aa, Homo sapiens
CAHRGNGSGSYSFHDYYYYGMDVW

SEQ ID NO: 58174 - protein, 18 aa, Homo sapiens
CARDSLMPRGYYYGMDVW

SEQ ID NO: 58175 - protein, 16 aa, Homo sapiens
CARRGQWLVSVNFDYW

SEQ ID NO: 58176 - protein, 19 aa, Homo sapiens
CARADGSYSWNYYYGMDVW

SEQ ID NO: 58177 - protein, 19 aa, Homo sapiens
CATVFPGYNWNDSNWFDPW

SEQ ID NO: 58178 - protein, 21 aa, Homo sapiens
CAKSITMIVVVNIPAGAFDIW

SEQ ID NO: 58179 - protein, 19 aa, Homo sapiens
CAREILDDSYGYSDGMDVW

SEQ ID NO: 58180 - protein, 20 aa, Homo sapiens
CARDFETTVVTPRGCHFDYW

SEQ ID NO: 58181 - protein, 22 aa, Homo sapiens
CARSLGVSIVVVVAATGWFDPW

SEQ ID NO: 58182 - protein, 26 aa, Homo sapiens
CAHRLDERYYDILTGYYSASYYFDYW

SEQ ID NO: 58183 - protein, 24 aa, Homo sapiens
CAKDWEADHSSSGSYYYYYGMDVW

SEQ ID NO: 58184 - protein, 18 aa, Homo sapiens
CASPSMIRGVVFWYFDLW

SEQ ID NO: 58185 - protein, 19 aa, Homo sapiens
CATLTDYGGNSEGSPFDYW

SEQ ID NO: 58186 - protein, 18 aa, Homo sapiens
CASPVAPDAYYYYGMDVW

SEQ ID NO: 58187 - protein, 19 aa, Homo sapiens
CAKDTNGYSSSWYTELDYW

SEQ ID NO: 58188 - protein, 16 aa, Homo sapiens
CAGHYFDTSGPRFDPW

SEQ ID NO: 58189 - protein, 22 aa, Homo sapiens
CARAPIPFREYSGYDLEGFDYW

SEQ ID NO: 58190 - protein, 24 aa, Homo sapiens
CARNVWYPYGDKTGLYYYYGMDVW

SEQ ID NO: 58191 - protein, 21 aa, Homo sapiens
CARQVTVLLWFGELLDWFDPW

SEQ ID NO: 58192 - protein, 20 aa, Homo sapiens
CVRGGSGSYYNPTTKKFDYW

SEQ ID NO: 58193 - protein, 24 aa, Homo sapiens
CARGHLRYDILTGYTLNSNWFDPW

SEQ ID NO: 58194 - protein, 20 aa, Homo sapiens
CASDVLLGAVPHSATFFDSW

SEQ ID NO: 58195 - protein, 17 aa, Homo sapiens
CCVVVPAAIGFYYFDYW

SEQ ID NO: 58196 - protein, 13 aa, Homo sapiens
CARTTVTTADDYW

SEQ ID NO: 58197 - protein, 19 aa, Homo sapiens
CARFVRGYSYGSYWFFDLW

SEQ ID NO: 58198 - protein, 21 aa, Homo sapiens
CARVRVDVQWPIYYYYGMDVW

SEQ ID NO: 58199 - protein, 16 aa, Homo sapiens
CAKDVGYSGYDLGDYW

SEQ ID NO: 58200 - protein, 14 aa, Homo sapiens
CARDWGVGENSDYW

SEQ ID NO: 58201 - protein, 21 aa, Homo sapiens
CARGYCSPTSCYDYYYGMDVW

SEQ ID NO: 58202 - protein, 17 aa, Homo sapiens
CAHRGIQLWHWGWFDPW

SEQ ID NO: 58203 - protein, 18 aa, Homo sapiens
CAKDVSEWLRPRGTFDYW

SEQ ID NO: 58204 - protein, 24 aa, Homo sapiens
CATDEANSWYVPIGSDYYYGMDVW

SEQ ID NO: 58205 - protein, 22 aa, Homo sapiens
CARTQYYYGSGSRSTIPKFDYW

SEQ ID NO: 58206 - protein, 21 aa, Homo sapiens
CARGPLRAYSGNDYGGYFDYW

SEQ ID NO: 58207 - protein, 14 aa, Homo sapiens
CARSTVVTLAFDIW

SEQ ID NO: 58208 - protein, 22 aa, Homo sapiens
CARDFGYYYDSSGYYPNYFDYW

SEQ ID NO: 58209 - protein, 20 aa, Homo sapiens
CAVLLWFGESHGLEYYFDYW

SEQ ID NO: 58210 - protein, 20 aa, Homo sapiens
CARHKTDSGSYLDEYYFDYW

SEQ ID NO: 58211 - protein, 17 aa, Homo sapiens
CARERSSSGSQYYFDYW

SEQ ID NO: 58212 - protein, 16 aa, Homo sapiens
CARDIPLTVQLELDYW

SEQ ID NO: 58213 - protein, 16 aa, Homo sapiens
CAKAGDADLKGYFDYW

SEQ ID NO: 58214 - protein, 24 aa, Homo sapiens
CARDNYPPIVIAVAGIDHNWFDPW

SEQ ID NO: 58215 - protein, 20 aa, Homo sapiens
CARGGMEGSGWYRARWFDPW

SEQ ID NO: 58216 - protein, 19 aa, Homo sapiens
CARHYTSGYYGEENWLDPW

SEQ ID NO: 58217 - protein, 17 aa, Homo sapiens
CARDGPYSSGPLGIDYW

SEQ ID NO: 58218 - protein, 22 aa, Homo sapiens
CARGGFDYGDYDNYYYYGMDVW

SEQ ID NO: 58219 - protein, 20 aa, Homo sapiens
CARDMQEIAAADYYYGMDVW

SEQ ID NO: 58220 - protein, 17 aa, Homo sapiens
CARVGAAAGFITAFDIW

SEQ ID NO: 58221 - protein, 20 aa, Homo sapiens
CARGLYSSSWYGRGKGHDYW

SEQ ID NO: 58222 - protein, 23 aa, Homo sapiens
CARDRWYYDSSGYPLPSWYFDLW

SEQ ID NO: 58223 - protein, 27 aa, Homo sapiens
CARESFGHDSSGYYYRLAYYYYGMDVW

SEQ ID NO: 58224 - protein, 23 aa, Homo sapiens
CATEGVGAPNSYGRYYYYGMDVW

SEQ ID NO: 58225 - protein, 22 aa, Homo sapiens
CARGGWMVRERYYYYYYGMDVW

SEQ ID NO: 58226 - protein, 19 aa, Homo sapiens
CAKDRYGIVGGLRWYFDLW

SEQ ID NO: 58227 - protein, 18 aa, Homo sapiens
CARVAQKFYVWGSEFDYW

SEQ ID NO: 58228 - protein, 23 aa, Homo sapiens
CARGQGGLTYYYDSSGYYSFDYW

SEQ ID NO: 58229 - protein, 12 aa, Homo sapiens
CQSYNTAPPLNF

SEQ ID NO: 58230 - protein, 11 aa, Homo sapiens
CAPLGQTFDIW

SEQ ID NO: 58231 - protein, 18 aa, Homo sapiens
CARVHQHFYSGSYMFDYW

SEQ ID NO: 58232 - protein, 16 aa, Homo sapiens
CAKPQGGSYLTAFDYW

SEQ ID NO: 58233 - protein, 18 aa, Homo sapiens
CARDLVVTAIPWYYFDYW

SEQ ID NO: 58234 - protein, 16 aa, Homo sapiens
CAHRPSIVGLGGFDYW

SEQ ID NO: 58235 - protein, 16 aa, Homo sapiens
CARDQGGSYSFTFDYW

SEQ ID NO: 58236 - protein, 21 aa, Homo sapiens
CARVGGLVGAQPHYYYGMDVW

SEQ ID NO: 58237 - protein, 15 aa, Homo sapiens
CAADGDYAFAVSDYW

SEQ ID NO: 58238 - protein, 17 aa, Homo sapiens
CVKEDVFYGPGRTLDYW

SEQ ID NO: 58239 - protein, 20 aa, Homo sapiens
CAKDLEWYSSSWYGPTFDYW

SEQ ID NO: 58240 - protein, 20 aa, Homo sapiens
CARDSIAAAGRRLLYYFDYW

SEQ ID NO: 58241 - protein, 20 aa, Homo sapiens
CARSDTAMVFDTRSDWFDPW

SEQ ID NO: 58242 - protein, 21 aa, Homo sapiens
CARRTMVRGVIITFNAAFDIW

SEQ ID NO: 58243 - protein, 14 aa, Homo sapiens
CASPAIFGGNMDYW

SEQ ID NO: 58244 - protein, 20 aa, Homo sapiens
CARADYDILTGRGTDAFDIW

SEQ ID NO: 58245 - protein, 25 aa, Homo sapiens
CATDPRRPMGRGVITYYYNYGMDVW

SEQ ID NO: 58246 - protein, 21 aa, Homo sapiens
CAKSQGDGYKLFGMDDAFDIW

SEQ ID NO: 58247 - protein, 16 aa, Homo sapiens
CAKAGGYALRTYFDYW

SEQ ID NO: 58248 - protein, 17 aa, Homo sapiens
CARVTARGVRLDAFDIW

SEQ ID NO: 58249 - protein, 16 aa, Homo sapiens
CAAPYDIRGYNWFDPW

SEQ ID NO: 58250 - protein, 20 aa, Homo sapiens
CAKDLTYCGGDCYSYVFDYW

SEQ ID NO: 58251 - protein, 21 aa, Homo sapiens
CARWDNYYDSSGYPRDAFDIW

SEQ ID NO: 58252 - protein, 20 aa, Homo sapiens
CARAYYGSGSYYNAGMFDYW

SEQ ID NO: 58253 - protein, 14 aa, Homo sapiens
CTKADLWPINFDYW

SEQ ID NO: 58254 - protein, 17 aa, Homo sapiens
CARGMYYYDASGHIDYW

SEQ ID NO: 58255 - protein, 15 aa, Homo sapiens
CQSADSSRTHPDVVF

SEQ ID NO: 58256 - protein, 16 aa, Homo sapiens
CARTVGELTFHWFDPW

SEQ ID NO: 58257 - protein, 17 aa, Homo sapiens
CARIKSEYLGFYYFDYW

SEQ ID NO: 58258 - protein, 23 aa, Homo sapiens
CAKDLLPHLYGSGYYYYYGMDVW

SEQ ID NO: 58259 - protein, 18 aa, Homo sapiens
CARDPRGSGSYYGWFDPW

SEQ ID NO: 58260 - protein, 22 aa, Homo sapiens
CARVKLLAAGPGLYYYYGMDVW

SEQ ID NO: 58261 - protein, 19 aa, Homo sapiens
CARGPLPDYGDSRSGFDYW

SEQ ID NO: 58262 - protein, 23 aa, Homo sapiens
CASCAIAAAGTPYYYYYYGMDVW

SEQ ID NO: 58263 - protein, 16 aa, Homo sapiens
CAHQKFLTGSIEFDYW

SEQ ID NO: 58264 - protein, 19 aa, Homo sapiens
CAKSRNMAAAGTEAFPDYW

SEQ ID NO: 58265 - protein, 19 aa, Homo sapiens
CAKAPGDGYNSREYYFDYW

SEQ ID NO: 58266 - protein, 21 aa, Homo sapiens
CARGGWSTVTTPRMYNWFDPW

SEQ ID NO: 58267 - protein, 22 aa, Homo sapiens
CARSNYDILTGYHLPNNWFDPW

SEQ ID NO: 58268 - protein, 17 aa, Homo sapiens
CTKEKNYSDRSGYFDPW

SEQ ID NO: 58269 - protein, 15 aa, Homo sapiens
CASTAAGHRYYFDYW

SEQ ID NO: 58270 - protein, 28 aa, Homo sapiens
CAKDLEWGGGTYYYDSSGYYEFSGFDYW

SEQ ID NO: 58271 - protein, 24 aa, Homo sapiens
CARASPQSPWIQLWSIAVGISDYW

SEQ ID NO: 58272 - protein, 12 aa, Homo sapiens
CTTSSLASGDYW

SEQ ID NO: 58273 - protein, 20 aa, Homo sapiens
CAKIWDYRGLTDTDNAFDIW

SEQ ID NO: 58274 - protein, 15 aa, Homo sapiens
CARWPRSAGGAFDIW

SEQ ID NO: 58275 - protein, 18 aa, Homo sapiens
CAKDLRWFGETYNWFDPW

SEQ ID NO: 58276 - protein, 22 aa, Homo sapiens
CARGRVEQWLGILWVEDAFDIW

SEQ ID NO: 58277 - protein, 18 aa, Homo sapiens
CARKGDPTTVVTWGIDYW

SEQ ID NO: 58278 - protein, 17 aa, Homo sapiens
CAKDSGYSYGYSWFDPW

SEQ ID NO: 58279 - protein, 15 aa, Homo sapiens
CARDRWVTYRYFDYW

SEQ ID NO: 58280 - protein, 20 aa, Homo sapiens
CASIAVAGGQYYYYYGMDVW

SEQ ID NO: 58281 - protein, 21 aa, Homo sapiens
CARVKYDSSGYYYHYWYFDLW

SEQ ID NO: 58282 - protein, 18 aa, Homo sapiens
CARGTTFGGVIPLGFDYW

SEQ ID NO: 58283 - protein, 15 aa, Homo sapiens
CARAGRETLFYLDYW

SEQ ID NO: 58284 - protein, 26 aa, Homo sapiens
CARQDGGYSYGRAYRGVYYYYGMDVW

SEQ ID NO: 58285 - protein, 19 aa, Homo sapiens
CARGAGILWFGLQNWFDPW

SEQ ID NO: 58286 - protein, 28 aa, Homo sapiens
CARATMVRGGEAWGTDQPYYYYYGMDVW

SEQ ID NO: 58287 - protein, 14 aa, Homo sapiens
CAKDGYNYGAFDHW

SEQ ID NO: 58288 - protein, 22 aa, Homo sapiens
CAKGGHCNNSTCSKGGAAFDIW

SEQ ID NO: 58289 - protein, 27 aa, Homo sapiens
CARVGDIVVVLAAMRGRRSSYNWFDPW

SEQ ID NO: 58290 - protein, 20 aa, Homo sapiens
CARDNPNGSSWYDHYWFDPW

SEQ ID NO: 58291 - protein, 21 aa, Homo sapiens
CARSEGYSYGYLPSNNWFDPW

SEQ ID NO: 58292 - protein, 23 aa, Homo sapiens
CAREFMYYDILTGYYAEGYFDYW

SEQ ID NO: 58293 - protein, 18 aa, Homo sapiens
CAKDIGGGNARWYYFDYW

SEQ ID NO: 58294 - protein, 21 aa, Homo sapiens
CTRGEVNFAWGSYRYTTFAYW

SEQ ID NO: 58295 - protein, 12 aa, Homo sapiens
CQQSLSIPMYTF

SEQ ID NO: 58296 - protein, 17 aa, Homo sapiens
CARLLHVAGTSPHFDYW

SEQ ID NO: 58297 - protein, 19 aa, Homo sapiens
CAREPYDSSGYYYGGGDYW

SEQ ID NO: 58298 - protein, 12 aa, Homo sapiens
CAREAVPGPDYW

SEQ ID NO: 58299 - protein, 20 aa, Homo sapiens
CARGPVYQLLRYYYYGMDVW

SEQ ID NO: 58300 - protein, 20 aa, Homo sapiens
CAREGVLSYYDSSGYFFDYW

SEQ ID NO: 58301 - protein, 23 aa, Homo sapiens
CARQPPGIAAAGTNYYYYGMDVW

SEQ ID NO: 58302 - protein, 15 aa, Homo sapiens
CCSYAGSSTSLNWVF

SEQ ID NO: 58303 - protein, 15 aa, Homo sapiens
CAKNDLYWNRVFDYW

SEQ ID NO: 58304 - protein, 24 aa, Homo sapiens
CAKVRLRLDYGLLPSRYYYGMDVW

SEQ ID NO: 58305 - protein, 11 aa, Homo sapiens
CQQSYSTPRTF

SEQ ID NO: 58306 - protein, 19 aa, Homo sapiens
CARGLLWFGEPEPDYFDYW

SEQ ID NO: 58307 - protein, 16 aa, Homo sapiens
CARDRGLVPGYKFDYW

SEQ ID NO: 58308 - protein, 24 aa, Homo sapiens
CARGAATKVTSYPYYHYYYAMDVW

SEQ ID NO: 58309 - protein, 19 aa, Homo sapiens
CATLLGGDSSGYLDAFDIW

SEQ ID NO: 58310 - protein, 22 aa, Homo sapiens
CAKDYGSGFPLFGYYYYGMDVW

SEQ ID NO: 58311 - protein, 15 aa, Homo sapiens
CAGSSWPTTGEFDYW

SEQ ID NO: 58312 - protein, 18 aa, Homo sapiens
CTTRGGGTVAAPYYFDFW

SEQ ID NO: 58313 - protein, 17 aa, Homo sapiens
CAKDLGGRSTSCYLDYW

SEQ ID NO: 58314 - protein, 21 aa, Homo sapiens
CARGVDIVVEAVASPYVFDMW

SEQ ID NO: 58315 - protein, 24 aa, Homo sapiens
CARDFWGYCSGGSCRYYYYGMDVW

SEQ ID NO: 58316 - protein, 15 aa, Homo sapiens
CARAPRGPYWYFDIW

SEQ ID NO: 58317 - protein, 17 aa, Homo sapiens
CARERGYSYGTYYFDYW

SEQ ID NO: 58318 - protein, 25 aa, Homo sapiens
CARQVIGSGPAWVSSLIYYYGMDVW

SEQ ID NO: 58319 - protein, 24 aa, Homo sapiens
CARDRGGYSSSWFSSDAPYYFDYW

SEQ ID NO: 58320 - protein, 17 aa, Homo sapiens
CARDHYYGGNSNTFDPW

SEQ ID NO: 58321 - protein, 17 aa, Homo sapiens
CATAPSLGVATSWFDPW

SEQ ID NO: 58322 - protein, 19 aa, Homo sapiens
CAKGVGAGYSYGLYLFDYW

SEQ ID NO: 58323 - protein, 17 aa, Homo sapiens
CVKGYYYDSKGYYFDHW

SEQ ID NO: 58324 - protein, 25 aa, Homo sapiens
CARRPADNRFGELFNYYYYYGMDVW

SEQ ID NO: 58325 - protein, 12 aa, Homo sapiens
CYSTDSIGNSEF

SEQ ID NO: 58326 - protein, 20 aa, Homo sapiens
CAKDFWFREQLVENYYFDYW

SEQ ID NO: 58327 - protein, 18 aa, Homo sapiens
CASYDGSGSYYSGNFDYW

SEQ ID NO: 58328 - protein, 18 aa, Homo sapiens
CAREGPSDSWNNWYFDLW

SEQ ID NO: 58329 - protein, 19 aa, Homo sapiens
CAKDMIKQWLVLEANLDYW

SEQ ID NO: 58330 - protein, 20 aa, Homo sapiens
CASQDGYSYGLSYYYGMDVW

SEQ ID NO: 58331 - protein, 14 aa, Homo sapiens
CARDNGPLDAFDLW

SEQ ID NO: 58332 - protein, 22 aa, Homo sapiens
CAKDVALVVTPHFYYYYGMDVW

SEQ ID NO: 58333 - protein, 21 aa, Homo sapiens
CAKGSFYYYGSGSYIDEFDYW

SEQ ID NO: 58334 - protein, 22 aa, Homo sapiens
CTRESDNDYGDYDYYYYGMDVW

SEQ ID NO: 58335 - protein, 16 aa, Homo sapiens
CAREGEGHFRTWFDPW

SEQ ID NO: 58336 - protein, 25 aa, Homo sapiens
CARDSHPIHYDILTGYYIPNWFDPW

SEQ ID NO: 58337 - protein, 18 aa, Homo sapiens
CATGGSGYDYVSLGLDYW

SEQ ID NO: 58338 - protein, 17 aa, Homo sapiens
CARDGPRGSSGFDFDYW

SEQ ID NO: 58339 - protein, 17 aa, Homo sapiens
CSKGRCGDRSCYYFDNW

SEQ ID NO: 58340 - protein, 18 aa, Homo sapiens
CANSCGGDCYYYYGMDVW

SEQ ID NO: 58341 - protein, 22 aa, Homo sapiens
CARDRGIVVVITENYYYGMDVW

SEQ ID NO: 58342 - protein, 20 aa, Homo sapiens
CARESYGGSSWYEGNWFDPW

SEQ ID NO: 58343 - protein, 24 aa, Homo sapiens
CARIPYYYDSSGYPLYPYYGMDVW

SEQ ID NO: 58344 - protein, 18 aa, Homo sapiens
CARDFMVWADTPMASDYW

SEQ ID NO: 58345 - protein, 27 aa, Homo sapiens
CARDRFKGPDYYGSGSYVYYYYGMDVW

SEQ ID NO: 58346 - protein, 18 aa, Homo sapiens
CARAPRPGYSYGYYFDYW

SEQ ID NO: 58347 - protein, 19 aa, Homo sapiens
CAKDKRAYYPHPMGAFDIW

SEQ ID NO: 58348 - protein, 20 aa, Homo sapiens
CVKVTVYYYDSSGYYELDYW

SEQ ID NO: 58349 - protein, 18 aa, Homo sapiens
CAKDNRLLWFGDSKFDPW

SEQ ID NO: 58350 - protein, 20 aa, Homo sapiens
CAREKEDYFDVPGYYYPDYW

SEQ ID NO: 58351 - protein, 18 aa, Homo sapiens
CARVGWGGWGHSNWFDPW

SEQ ID NO: 58352 - protein, 18 aa, Homo sapiens
CAKAKAGSWYAAEYFQHW

SEQ ID NO: 58353 - protein, 21 aa, Homo sapiens
CARRAFGWFGELGPPDAFDIW

SEQ ID NO: 58354 - protein, 12 aa, Homo sapiens
CAHRRVDHLDYW

SEQ ID NO: 58355 - protein, 20 aa, Homo sapiens
CAKDIRASSSFWIADAFDIW

SEQ ID NO: 58356 - protein, 23 aa, Homo sapiens
CAKESPEQWLVRLWTIPYYFDYW

SEQ ID NO: 58357 - protein, 17 aa, Homo sapiens
CARAVGATNYVWYFDLW

SEQ ID NO: 58358 - protein, 19 aa, Homo sapiens
CARVLSGPGQYYYYGMDVW

SEQ ID NO: 58359 - protein, 23 aa, Homo sapiens
CAKTHPPRTVLGIDAGYWYFDLW

SEQ ID NO: 58360 - protein, 27 aa, Homo sapiens
CARDMYYGSGSGEEGSNYYYYYGMDVW

SEQ ID NO: 58361 - protein, 16 aa, Homo sapiens
CPVGYCSGGSCYLGYW

SEQ ID NO: 58362 - protein, 21 aa, Homo sapiens
CARLTQLRYFDWVRANWFDPW

SEQ ID NO: 58363 - protein, 23 aa, Homo sapiens
CARDRFEGATLKSYYYYYGMDVW

SEQ ID NO: 58364 - protein, 21 aa, Homo sapiens
CARVNVRHFDWLSVPYYFDYW

SEQ ID NO: 58365 - protein, 15 aa, Homo sapiens
CAKDRYSGFDVFDYW

SEQ ID NO: 58366 - protein, 19 aa, Homo sapiens
CAAADWLWFGELSSWFDPW

SEQ ID NO: 58367 - protein, 12 aa, Homo sapiens
CQLYGNLPPLTF

SEQ ID NO: 58368 - protein, 18 aa, Homo sapiens
CARDLSFAVLYQYYFDYW

SEQ ID NO: 58369 - protein, 18 aa, Homo sapiens
CAKVILWFGELSWAFDIW

SEQ ID NO: 58370 - protein, 14 aa, Homo sapiens
CVKGSENYYLFDFW

SEQ ID NO: 58371 - protein, 12 aa, Homo sapiens
CANWGGAYFDYW

SEQ ID NO: 58372 - protein, 16 aa, Homo sapiens
CANVNILAVAGTLDYW

SEQ ID NO: 58373 - protein, 16 aa, Homo sapiens
CARHRKGVGATPFDYW

SEQ ID NO: 58374 - protein, 12 aa, Homo sapiens
CAKSPNSGFDPW

SEQ ID NO: 58375 - protein, 20 aa, Homo sapiens
CAKDPYQWELDDYYYGMDVW

SEQ ID NO: 58376 - protein, 22 aa, Homo sapiens
CARAVMGCSSTSCYEDRWFDPW

SEQ ID NO: 58377 - protein, 18 aa, Homo sapiens
CARPMLAAAIFDDAFDIW

SEQ ID NO: 58378 - protein, 29 aa, Homo sapiens
CARDPGPYDILTGFVVPNSNYYYYGMDVW

SEQ ID NO: 58379 - protein, 19 aa, Homo sapiens
CAREPLLASGGRAGWFDPW

SEQ ID NO: 58380 - protein, 17 aa, Homo sapiens
CARHLSGIAVAGPFGYW

SEQ ID NO: 58381 - protein, 25 aa, Homo sapiens
CAREVGSSGWYRPMGYYYYYGMDVW

SEQ ID NO: 58382 - protein, 17 aa, Homo sapiens
CARDEDTVTTTEYFDYW

SEQ ID NO: 58383 - protein, 19 aa, Homo sapiens
CAKNIGYYGSGSHYYFDYW

SEQ ID NO: 58384 - protein, 18 aa, Homo sapiens
CAKEGYSGYDSLRHFDYW

SEQ ID NO: 58385 - protein, 30 aa, Homo sapiens
CARDRRYYDILTGYMGERYHYYYYYGMDVW

SEQ ID NO: 58386 - protein, 28 aa, Homo sapiens
CAREEWGDSSGWYALRLVGGYYYGMDVW

SEQ ID NO: 58387 - protein, 24 aa, Homo sapiens
CAHRPWFLTMTTVTTRRENWFDPW

SEQ ID NO: 58388 - protein, 16 aa, Homo sapiens
CARGYVGHLTMGSDYW

SEQ ID NO: 58389 - protein, 26 aa, Homo sapiens
CARDSEVGCSGGSCYRFYYYYGMDVW

SEQ ID NO: 58390 - protein, 22 aa, Homo sapiens
CARTYDYDILTGYQNNDAFDIW

SEQ ID NO: 58391 - protein, 16 aa, Homo sapiens
CARDAGSGWTEAIDYW

SEQ ID NO: 58392 - protein, 26 aa, Homo sapiens
CARGVRYYYDSSGYYSPGEAEYFQHW

SEQ ID NO: 58393 - protein, 16 aa, Homo sapiens
CARDLFILDSSGNDYW

SEQ ID NO: 58394 - protein, 19 aa, Homo sapiens
CARDFGIMSSYYDILTDYW

SEQ ID NO: 58395 - protein, 19 aa, Homo sapiens
CAREGRNYYGSGSWSYDYW

SEQ ID NO: 58396 - protein, 23 aa, Homo sapiens
CARFSTPFIVVVPAANHDAFDIW

SEQ ID NO: 58397 - protein, 15 aa, Homo sapiens
CARVYVGAGQFFEYW

SEQ ID NO: 58398 - protein, 21 aa, Homo sapiens
CARDVSTFDWLFSPLWVSDYW

SEQ ID NO: 58399 - protein, 16 aa, Homo sapiens
CARDRLADDADAFDIW

SEQ ID NO: 58400 - protein, 22 aa, Homo sapiens
CAKDGIMITFGGVIALYYFDYW

SEQ ID NO: 58401 - protein, 19 aa, Homo sapiens
CESLVLLWFGERSVLKDYW

SEQ ID NO: 58402 - protein, 13 aa, Homo sapiens
CARAGDSDTFDIW

SEQ ID NO: 58403 - protein, 18 aa, Homo sapiens
CAKVSYSYGYEVMAFDYW

SEQ ID NO: 58404 - protein, 28 aa, Homo sapiens
CTTEDSPSYCSGGSCYSIRFYYYGMDVW

SEQ ID NO: 58405 - protein, 16 aa, Homo sapiens
CARYSSGGSSKWFDPW

SEQ ID NO: 58406 - protein, 19 aa, Homo sapiens
CARGQFSRQLVVRYYFDYW

SEQ ID NO: 58407 - protein, 21 aa, Homo sapiens
CARVGLMSRTGWYSGYHFDYW

SEQ ID NO: 58408 - protein, 19 aa, Homo sapiens
CAKGMSSGWYVHYYGMDVW

SEQ ID NO: 58409 - protein, 13 aa, Homo sapiens
CARMGVGPWLDYW

SEQ ID NO: 58410 - protein, 19 aa, Homo sapiens
CASYKLTQAGYSSIEFDYW

SEQ ID NO: 58411 - protein, 20 aa, Homo sapiens
CATERSGRQWLAFLSPFDYW

SEQ ID NO: 58412 - protein, 22 aa, Homo sapiens
CARHRPGYDSSGYYSEFHFDYW

SEQ ID NO: 58413 - protein, 19 aa, Homo sapiens
CAREHEYDTNGYYGEFDYW

SEQ ID NO: 58414 - protein, 26 aa, Homo sapiens
CARAGLHALYYYDSSGYPLADAFDIW

SEQ ID NO: 58415 - protein, 18 aa, Homo sapiens
CAKLGYYDSSGYEYADYW

SEQ ID NO: 58416 - protein, 15 aa, Homo sapiens
CARMSYSSSPHFDYW

SEQ ID NO: 58417 - protein, 17 aa, Homo sapiens
CAKDKGDGYNFRYFDLW

SEQ ID NO: 58418 - protein, 25 aa, Homo sapiens
CARDRALWFGELLQTPYYYYGMDVW

SEQ ID NO: 58419 - protein, 16 aa, Homo sapiens
CVRVAPASIGGYFDYW

SEQ ID NO: 58420 - protein, 20 aa, Homo sapiens
CTRPVLYDSAPHSSDWFDPW

SEQ ID NO: 58421 - protein, 20 aa, Homo sapiens
CAREGVDINTMFPYNWFDPW

SEQ ID NO: 58422 - protein, 21 aa, Homo sapiens
CARERRYSFQGDSGEDYFDYW

SEQ ID NO: 58423 - protein, 18 aa, Homo sapiens
CARGHPKNFYGSGNFDYW

SEQ ID NO: 58424 - protein, 17 aa, Homo sapiens
CAKDRWGDGYNYDFDYW

SEQ ID NO: 58425 - protein, 22 aa, Homo sapiens
CARDLPHYYDSSGYYTTQLDYW

SEQ ID NO: 58426 - protein, 21 aa, Homo sapiens
CARSRHIVVVTVFSPYYFDYW

SEQ ID NO: 58427 - protein, 19 aa, Homo sapiens
CARGGSDSSSWSGYYFDYW

SEQ ID NO: 58428 - protein, 19 aa, Homo sapiens
CASNPSSSWYVYYYGMDVW

SEQ ID NO: 58429 - protein, 18 aa, Homo sapiens
CARIRDGSGWFLYYFDYW

SEQ ID NO: 58430 - protein, 20 aa, Homo sapiens
CARQSPLWFGEFTVPNLDYW

SEQ ID NO: 58431 - protein, 16 aa, Homo sapiens
CARPTYSDSSGPFDFW

SEQ ID NO: 58432 - protein, 23 aa, Homo sapiens
CARYGFSYYDILTGYPPAAFDIW

SEQ ID NO: 58433 - protein, 24 aa, Homo sapiens
CARDVLVPAATPTGYYYYYGMDVW

SEQ ID NO: 58434 - protein, 19 aa, Homo sapiens
CTGALGSDYFYYYYGMDIW

SEQ ID NO: 58435 - protein, 17 aa, Homo sapiens
CVRDMRGSSGTYFFDYW

SEQ ID NO: 58436 - protein, 17 aa, Homo sapiens
CASGLERWLQLAAFDIW

SEQ ID NO: 58437 - protein, 26 aa, Homo sapiens
CARDLTPHGGIAVAGHYYYYYGMDVW

SEQ ID NO: 58438 - protein, 16 aa, Homo sapiens
CATVFSWNGDGHLDYW

SEQ ID NO: 58439 - protein, 19 aa, Homo sapiens
CASVPRTYYYGSGSSFDYW

SEQ ID NO: 58440 - protein, 16 aa, Homo sapiens
CARDLARNWGFYFDYW

SEQ ID NO: 58441 - protein, 24 aa, Homo sapiens
CAREPRGYYDSSGYYHPEYYFDYW

SEQ ID NO: 58442 - protein, 23 aa, Homo sapiens
CARDNPPPYDYVWGSYRGGLDYW

SEQ ID NO: 58443 - protein, 14 aa, Homo sapiens
CASSYGDYNPFDSW

SEQ ID NO: 58444 - protein, 25 aa, Homo sapiens
CARAGRVTFGGVIVIPRTQDAFDIW

SEQ ID NO: 58445 - protein, 23 aa, Homo sapiens
CAKPPLLWFGELLGYAGAYFDYW

SEQ ID NO: 58446 - protein, 23 aa, Homo sapiens
CVRDLRTKGVAGRGYIYYGMDVW

SEQ ID NO: 58447 - protein, 15 aa, Homo sapiens
CARGPFVVISAPDYW

SEQ ID NO: 58448 - protein, 23 aa, Homo sapiens
CARRAYYYDSSGSPIRNHAFDIW

SEQ ID NO: 58449 - protein, 17 aa, Homo sapiens
CTSHLRYNWKGDAFDIW

SEQ ID NO: 58450 - protein, 16 aa, Homo sapiens
CAKDRSGSYYGPYDYW

SEQ ID NO: 58451 - protein, 17 aa, Homo sapiens
CAKDQETNLDWYVFDYW

SEQ ID NO: 58452 - protein, 16 aa, Homo sapiens
CAKSSNGDYGYYFDSW

SEQ ID NO: 58453 - protein, 21 aa, Homo sapiens
CARVTTLRYFDWTHLYYFDYW

SEQ ID NO: 58454 - protein, 22 aa, Homo sapiens
CAKDHYYDSSGYLPYYYGMDVW

SEQ ID NO: 58455 - protein, 20 aa, Homo sapiens
CAKDPWGYCSGGSCHSPDYW

SEQ ID NO: 58456 - protein, 18 aa, Homo sapiens
CGLDRWYRKIRIHVFDIW

SEQ ID NO: 58457 - protein, 18 aa, Homo sapiens
CAREDIVVVVAASPFDYW

SEQ ID NO: 58458 - protein, 17 aa, Homo sapiens
CARGSWSTSAQDVFDIW

SEQ ID NO: 58459 - protein, 24 aa, Homo sapiens
CAKHFGRWELLLVGEVVSPPFDYW

SEQ ID NO: 58460 - protein, 24 aa, Homo sapiens
CARLRVVPAAMSSGVYYYYGMDVW

SEQ ID NO: 58461 - protein, 22 aa, Homo sapiens
CASNWFDCSGGSCYYYYGMDVW

SEQ ID NO: 58462 - protein, 19 aa, Homo sapiens
CAKDPLWEPHREDLNFDYW

SEQ ID NO: 58463 - protein, 22 aa, Homo sapiens
CARVKGLDDYGDYSTLDAFDIW

SEQ ID NO: 58464 - protein, 21 aa, Homo sapiens
CARDSGPVVAALGGYNWFDPW

SEQ ID NO: 58465 - protein, 19 aa, Homo sapiens
CAVRTGYCGGDCHQYLGYW

SEQ ID NO: 58466 - protein, 17 aa, Homo sapiens
CARSYVVGAARGAFDIW

SEQ ID NO: 58467 - protein, 20 aa, Homo sapiens
CARFRRYCSGGSCYSWEDYW

SEQ ID NO: 58468 - protein, 21 aa, Homo sapiens
CAREVFEQQLVFLGPRYFDYW

SEQ ID NO: 58469 - protein, 17 aa, Homo sapiens
CARVPAREDFDWLFDYW

SEQ ID NO: 58470 - protein, 17 aa, Homo sapiens
CARPRIVGATSRWFDPW

SEQ ID NO: 58471 - protein, 21 aa, Homo sapiens
CARDRLIDYSSGWYGFYFDYW

SEQ ID NO: 58472 - protein, 19 aa, Homo sapiens
CAHEYYDILTGYYTPADYW

SEQ ID NO: 58473 - protein, 17 aa, Homo sapiens
CARDLGELLPYYALDVW

SEQ ID NO: 58474 - protein, 20 aa, Homo sapiens
CARASDVWFGESKSHYFDYW

SEQ ID NO: 58475 - protein, 18 aa, Homo sapiens
CAREGFGGDVRVRAFDIW

SEQ ID NO: 58476 - protein, 14 aa, Homo sapiens
CARVLPRYEYFDYW

SEQ ID NO: 58477 - protein, 14 aa, Homo sapiens
CARFTVAGPKIDYW

SEQ ID NO: 58478 - protein, 23 aa, Homo sapiens
CARVAINYCSSTSCYSYWYFDLW

SEQ ID NO: 58479 - protein, 14 aa, Homo sapiens
CAHNGLVRGSFDYW

SEQ ID NO: 58480 - protein, 15 aa, Homo sapiens
CARVQVDLYWYFDLW

SEQ ID NO: 58481 - protein, 18 aa, Homo sapiens
CARHGGTYSSSWYNIDYW

SEQ ID NO: 58482 - protein, 19 aa, Homo sapiens
CARGGLDSSGWHPYYFDYW

SEQ ID NO: 58483 - protein, 20 aa, Homo sapiens
CTTDYDGSGSYYIYGAFDIW

SEQ ID NO: 58484 - protein, 21 aa, Homo sapiens
CARDGVGGREDHYYYYGMDVW

SEQ ID NO: 58485 - protein, 29 aa, Homo sapiens
CAREPSPSSYDILTGYQPKSYYYYGMDVW

SEQ ID NO: 58486 - protein, 18 aa, Homo sapiens
CARDGSSWFPKYNWFDPW

SEQ ID NO: 58487 - protein, 17 aa, Homo sapiens
CATETITMSGWYYFDYW

SEQ ID NO: 58488 - protein, 18 aa, Homo sapiens
CARDVGIQLWLGEYFQHW

SEQ ID NO: 58489 - protein, 23 aa, Homo sapiens
CARHSEGYCSGGSCYGRSFFDFW

SEQ ID NO: 58490 - protein, 20 aa, Homo sapiens
CASELSSSLDRGYYYGMDVW

SEQ ID NO: 58491 - protein, 20 aa, Homo sapiens
CARGRLWKGIAASRYYFDYW

SEQ ID NO: 58492 - protein, 16 aa, Homo sapiens
CAKDAYRNGPYYFDSW

SEQ ID NO: 58493 - protein, 15 aa, Homo sapiens
CARDLLVGAEWFDPW

SEQ ID NO: 58494 - protein, 19 aa, Homo sapiens
CARAGSGWYLGPSWYFDLW

SEQ ID NO: 58495 - protein, 17 aa, Homo sapiens
CAKDKSYTNYGDAFDIW

SEQ ID NO: 58496 - protein, 19 aa, Homo sapiens
CAGEMATITGYYYYGMDVW

SEQ ID NO: 58497 - protein, 23 aa, Homo sapiens
CARGGWNYDILTGYYKGFYFDYW

SEQ ID NO: 58498 - protein, 22 aa, Homo sapiens
CARDLGSDISAFYYYYYGMDVW

SEQ ID NO: 58499 - protein, 24 aa, Homo sapiens
CARDQPLAWFGAIHYPGYYGMDVW

SEQ ID NO: 58500 - protein, 23 aa, Homo sapiens
CAHRQYNGYCSGGSCPNDAFDIW

SEQ ID NO: 58501 - protein, 18 aa, Homo sapiens
CARHAQHHQVSGYYWDYW

SEQ ID NO: 58502 - protein, 24 aa, Homo sapiens
CARDGSDYDYVWGSYRYNEAVDYW

SEQ ID NO: 58503 - protein, 24 aa, Homo sapiens
CARGIADSTCSGGSCYHLYYFDYW

SEQ ID NO: 58504 - protein, 18 aa, Homo sapiens
CASRFFRGYSYGYGFDPW

SEQ ID NO: 58505 - protein, 20 aa, Homo sapiens
CARHARPEWIQPVGGYFDYW

SEQ ID NO: 58506 - protein, 16 aa, Homo sapiens
CASSPGWTPGTHFDYW

SEQ ID NO: 58507 - protein, 21 aa, Homo sapiens
CARDSFGGAGIYYKAYAMDVW

SEQ ID NO: 58508 - protein, 17 aa, Homo sapiens
CARGSMVRGVITGFDPW

SEQ ID NO: 58509 - protein, 19 aa, Homo sapiens
CASSGGPPPYYYYYGMDVW

SEQ ID NO: 58510 - protein, 14 aa, Homo sapiens
CASAKYGDYKYDYW

SEQ ID NO: 58511 - protein, 20 aa, Homo sapiens
CAKDLRFGDHVDYYYGMDVW

SEQ ID NO: 58512 - protein, 23 aa, Homo sapiens
CARDLQYYDILTGYYTHYGMDVW

SEQ ID NO: 58513 - protein, 17 aa, Homo sapiens
CARDSSATWLVTAFDYW

SEQ ID NO: 58514 - protein, 13 aa, Homo sapiens
CQQYNSFIPGYSF

SEQ ID NO: 58515 - protein, 16 aa, Homo sapiens
CAKAVDIVATMDFDYW

SEQ ID NO: 58516 - protein, 23 aa, Homo sapiens
CARERGAGLTNRITMVRGVFDYW

SEQ ID NO: 58517 - protein, 19 aa, Homo sapiens
CARYGIVPAALLPDYFDYW

SEQ ID NO: 58518 - protein, 24 aa, Homo sapiens
CATQLRAPLCSGGSCYYYYGMDVW

SEQ ID NO: 58519 - protein, 18 aa, Homo sapiens
CAKSVYSAGWNLDALDVW

SEQ ID NO: 58520 - protein, 19 aa, Homo sapiens
CARRLGDWLFKTVGAFDIW

SEQ ID NO: 58521 - protein, 22 aa, Homo sapiens
CARQALGYYDSSGYVENAFDIW

SEQ ID NO: 58522 - protein, 12 aa, Homo sapiens
CAREWLVRYDYW

SEQ ID NO: 58523 - protein, 21 aa, Homo sapiens
CARGGDIVVVPAAIVSWFDPW

SEQ ID NO: 58524 - protein, 15 aa, Homo sapiens
CARVFRDGYTLFDYW

SEQ ID NO: 58525 - protein, 24 aa, Homo sapiens
CARDLGQLLWFGELSFSYNWFDPW

SEQ ID NO: 58526 - protein, 17 aa, Homo sapiens
CARGWFGQSWGYYFDYW

SEQ ID NO: 58527 - protein, 18 aa, Homo sapiens
CAKAGDIVATISWYFDLW

SEQ ID NO: 58528 - protein, 22 aa, Homo sapiens
CAREGYSSSWYYHYYYYGMDVW

SEQ ID NO: 58529 - protein, 16 aa, Homo sapiens
CARASSWYSERWFDPW

SEQ ID NO: 58530 - protein, 15 aa, Homo sapiens
CARLDSFGYNFFDFW

SEQ ID NO: 58531 - protein, 21 aa, Homo sapiens
CAHRPGIAAAGTQWSFWFDPW

SEQ ID NO: 58532 - protein, 18 aa, Homo sapiens
CAFSRDGYKSPSLYFDYW

SEQ ID NO: 58533 - protein, 9 aa, Homo sapiens
CLQHDNWTF

SEQ ID NO: 58534 - protein, 12 aa, Homo sapiens
CTRGIVGVFDYW

SEQ ID NO: 58535 - protein, 16 aa, Homo sapiens
CAKGYTFGLYNWFDPW

SEQ ID NO: 58536 - protein, 23 aa, Homo sapiens
CARGLDIVATIFFVRGGISFDYW

SEQ ID NO: 58537 - protein, 20 aa, Homo sapiens
CARDLHYFDSGGYSDTFDIW

SEQ ID NO: 58538 - protein, 17 aa, Homo sapiens
CVRDRDYGDFHYQFDYW

SEQ ID NO: 58539 - protein, 17 aa, Homo sapiens
CARGQTYNWKGNWFDPW

SEQ ID NO: 58540 - protein, 20 aa, Homo sapiens
CAREGGSGGSWGYYYGMDVW

SEQ ID NO: 58541 - protein, 14 aa, Homo sapiens
CARDFGGTGWFDPW

SEQ ID NO: 58542 - protein, 18 aa, Homo sapiens
CARSRYCSSSSCYLLDYW

SEQ ID NO: 58543 - protein, 16 aa, Homo sapiens
CASHAGYGLSQHFDYW

SEQ ID NO: 58544 - protein, 20 aa, Homo sapiens
CARDGDFRLYSSGWYRFDYW

SEQ ID NO: 58545 - protein, 22 aa, Homo sapiens
CAKDSSQYCSGGSCQDTHLDYW

SEQ ID NO: 58546 - protein, 15 aa, Homo sapiens
CARTNIAAAVSFDPW

SEQ ID NO: 58547 - protein, 13 aa, Homo sapiens
CARDGGHYAMDVW

SEQ ID NO: 58548 - protein, 17 aa, Homo sapiens
CARKAYSSDWYDPLDYW

SEQ ID NO: 58549 - protein, 18 aa, Homo sapiens
CARDRGTSWYTGQPFDIW

SEQ ID NO: 58550 - protein, 12 aa, Homo sapiens
CTRFGSGSFDFW

SEQ ID NO: 58551 - protein, 17 aa, Homo sapiens
CAKPYTIHPILNYFDYW

SEQ ID NO: 58552 - protein, 13 aa, Homo sapiens
CAGSANFYSFDFW

SEQ ID NO: 58553 - protein, 16 aa, Homo sapiens
CAKALVGATGYYFDYW

SEQ ID NO: 58554 - protein, 26 aa, Homo sapiens
CARNPCAHVGVTSCSLSYYYYGMDVW

SEQ ID NO: 58555 - protein, 16 aa, Homo sapiens
CAKSAASLGSNRFDSW

SEQ ID NO: 58556 - protein, 18 aa, Homo sapiens
CATEFAVWGSYRTYFDYW

SEQ ID NO: 58557 - protein, 21 aa, Homo sapiens
CARDFVVVTAIGYYYYGMDVW

SEQ ID NO: 58558 - protein, 19 aa, Homo sapiens
CARIPVLRSGYDHDAFDIW

SEQ ID NO: 58559 - protein, 20 aa, Homo sapiens
CAKSTWSYYYDSSGYPPDYW

SEQ ID NO: 58560 - protein, 18 aa, Homo sapiens
CARRALGGTAMMTYFDYW

SEQ ID NO: 58561 - protein, 18 aa, Homo sapiens
CTTGLVYDVLTGYYRDYW

SEQ ID NO: 58562 - protein, 24 aa, Homo sapiens
CARVGRHDALWGSRYDPKNFLDYW

SEQ ID NO: 58563 - protein, 18 aa, Homo sapiens
CARDARDYGGNTLPNDYW

SEQ ID NO: 58564 - protein, 17 aa, Homo sapiens
CATVLMPRVSFSAFDYW

SEQ ID NO: 58565 - protein, 25 aa, Homo sapiens
CAREKRSGYDILTGYILYYYGMDVW

SEQ ID NO: 58566 - protein, 16 aa, Homo sapiens
CAKGKFLHLGSHGDYW

SEQ ID NO: 58567 - protein, 19 aa, Homo sapiens
CASYDVDIVATIGGGFDYW

SEQ ID NO: 58568 - protein, 20 aa, Homo sapiens
CARGEIVATINYYYYGMDVW

SEQ ID NO: 58569 - protein, 20 aa, Homo sapiens
CVRAYRLMYEIDSQYYFEYW

SEQ ID NO: 58570 - protein, 20 aa, Homo sapiens
CARTSEDILTGRLLFYFDYW

SEQ ID NO: 58571 - protein, 14 aa, Homo sapiens
CAHRRWGFDSFGYW

SEQ ID NO: 58572 - protein, 26 aa, Homo sapiens
CARDKGPITQYTYNSRPFSDDALDFW

SEQ ID NO: 58573 - protein, 25 aa, Homo sapiens
CARDIRVLRYFDWQNDYYYYGMDVW

SEQ ID NO: 58574 - protein, 20 aa, Homo sapiens
CARDGSYGTGGSYFYAMDVW

SEQ ID NO: 58575 - protein, 21 aa, Homo sapiens
CARDPTPLPVLGYYYYGMDVW

SEQ ID NO: 58576 - protein, 15 aa, Homo sapiens
CAREVHNGRGRFDSW

SEQ ID NO: 58577 - protein, 23 aa, Homo sapiens
CAREAGGDYDILTGYLVNWFDPW

SEQ ID NO: 58578 - protein, 19 aa, Homo sapiens
CAKAIGMATILWADAFDIW

SEQ ID NO: 58579 - protein, 17 aa, Homo sapiens
CARGRSATWDIDTFNVW

SEQ ID NO: 58580 - protein, 21 aa, Homo sapiens
CARDGSASSRWSPLTVYFDCW

SEQ ID NO: 58581 - protein, 20 aa, Homo sapiens
CAKDGLRGSYRYTGSAFDYW

SEQ ID NO: 58582 - protein, 11 aa, Homo sapiens
CMQAKHLPYSF

SEQ ID NO: 58583 - protein, 15 aa, Homo sapiens
CARPPRGTYYAFDLW

SEQ ID NO: 58584 - protein, 19 aa, Homo sapiens
CARGIAAAGTFLADYFDYW

SEQ ID NO: 58585 - protein, 15 aa, Homo sapiens
CAREGGYSSSYYDHW

SEQ ID NO: 58586 - protein, 21 aa, Homo sapiens
CARGKRYSYGAYYYYYGMDVW

SEQ ID NO: 58587 - protein, 19 aa, Homo sapiens
CAREGGISFEWPLYYFDYW

SEQ ID NO: 58588 - protein, 18 aa, Homo sapiens
CAKDHRGYYYGSGAWDYW

SEQ ID NO: 58589 - protein, 16 aa, Homo sapiens
CAKDSANWGSSYFDYW

SEQ ID NO: 58590 - protein, 14 aa, Homo sapiens
CQQYIDSPYISYTF

SEQ ID NO: 58591 - protein, 16 aa, Homo sapiens
CAREGHQLLYHWFDPW

SEQ ID NO: 58592 - protein, 19 aa, Homo sapiens
CARHLNEWELLHSAAFDIW

SEQ ID NO: 58593 - protein, 23 aa, Homo sapiens
CAREKRPMWFGELLYYYYGMDVW

SEQ ID NO: 58594 - protein, 17 aa, Homo sapiens
CAKGPYYGSGSYSFDYW

SEQ ID NO: 58595 - protein, 19 aa, Homo sapiens
CASIAAAENLYYYYGMDVW

SEQ ID NO: 58596 - protein, 27 aa, Homo sapiens
CARDSAITMVRGVTPNSYYYYYGMDVW

SEQ ID NO: 58597 - protein, 17 aa, Homo sapiens
CARQYGSYSFDDAFDIW

SEQ ID NO: 58598 - protein, 19 aa, Homo sapiens
CAKYHGPGPQSGNYYFDYW

SEQ ID NO: 58599 - protein, 16 aa, Homo sapiens
CARLEGTAVTWYFDLW

SEQ ID NO: 58600 - protein, 18 aa, Homo sapiens
CAKYAHPYDILTGYYGYW

SEQ ID NO: 58601 - protein, 24 aa, Homo sapiens
CAKDSHRYYYGSGSYYPEDYFDYW

SEQ ID NO: 58602 - protein, 22 aa, Homo sapiens
CARLTRGYDILTTYYTYAMDVW

SEQ ID NO: 58603 - protein, 22 aa, Homo sapiens
CAHLPSSEIAPGDALLWFFDFW

SEQ ID NO: 58604 - protein, 23 aa, Homo sapiens
CSTSLMVRGVREINYYYYGMDVW

SEQ ID NO: 58605 - protein, 19 aa, Homo sapiens
CTTSLEWELHYYYYGMDVW

SEQ ID NO: 58606 - protein, 23 aa, Homo sapiens
CAHRVWYYGSGSYYKGDDAFDIW

SEQ ID NO: 58607 - protein, 13 aa, Homo sapiens
CAKLPQHSSADYW

SEQ ID NO: 58608 - protein, 18 aa, Homo sapiens
CAKDVVVISPSYWYFDLW

SEQ ID NO: 58609 - protein, 17 aa, Homo sapiens
CARDTSGSYYNWYFDLW

SEQ ID NO: 58610 - protein, 23 aa, Homo sapiens
CATDLGLRYFDWASPESNWFDPW

SEQ ID NO: 58611 - protein, 29 aa, Homo sapiens
CARDSPFVPAADQWELLRMGYYYYGMDVW

SEQ ID NO: 58612 - protein, 25 aa, Homo sapiens
CARQPGGITIVLVALLRDEWYFDLW

SEQ ID NO: 58613 - protein, 34 aa, Homo sapiens
CALPILRAEDTAVYYCARGGVSSSSWWAYYFDYW

SEQ ID NO: 58614 - protein, 18 aa, Homo sapiens
CASGGWFGELEGGSIDYW

SEQ ID NO: 58615 - protein, 18 aa, Homo sapiens
CAHRQWSGYESPGVFDPW

SEQ ID NO: 58616 - protein, 18 aa, Homo sapiens
CARDRRWLRHEPWYFDLW

SEQ ID NO: 58617 - protein, 16 aa, Homo sapiens
CAKGRGTSVWGDLDYW

SEQ ID NO: 58618 - protein, 15 aa, Homo sapiens
CARREATVTTWVDYW

SEQ ID NO: 58619 - protein, 17 aa, Homo sapiens
CFAGIAVAGPHPEVDYW

SEQ ID NO: 58620 - protein, 22 aa, Homo sapiens
CARGGVNVGDIVVVVAALFDLW

SEQ ID NO: 58621 - protein, 14 aa, Homo sapiens
CARQTPRGLALDYW

SEQ ID NO: 58622 - protein, 13 aa, Homo sapiens
CVGAEAEGWLDPW

SEQ ID NO: 58623 - protein, 23 aa, Homo sapiens
CARDFGHVDYYDSSGYLNAFDIW

SEQ ID NO: 58624 - protein, 16 aa, Homo sapiens
CARDYGRGWLRFFDYW

SEQ ID NO: 58625 - protein, 17 aa, Homo sapiens
CASTDPYDSSGRLFDYW

SEQ ID NO: 58626 - protein, 21 aa, Homo sapiens
CARSSLCGYRGRDCLSYSDHW

SEQ ID NO: 58627 - protein, 15 aa, Homo sapiens
CQSADSSDPYPDVLF

SEQ ID NO: 58628 - protein, 15 aa, Homo sapiens
CAKDPYGLDYFFEYW

SEQ ID NO: 58629 - protein, 20 aa, Homo sapiens
CARQDGYCSGGSCLNWFGPW

SEQ ID NO: 58630 - protein, 18 aa, Homo sapiens
CASLTGPHDYYYYGMDVW

SEQ ID NO: 58631 - protein, 20 aa, Homo sapiens
CARSHFDSTGYYHRSPFDYW

SEQ ID NO: 58632 - protein, 20 aa, Homo sapiens
CAKGWSLGIAVAGTSVLDYW

SEQ ID NO: 58633 - protein, 11 aa, Homo sapiens
CAHRLRYTIYW

SEQ ID NO: 58634 - protein, 14 aa, Homo sapiens
CQSAENSGTYPRVF

SEQ ID NO: 58635 - protein, 18 aa, Homo sapiens
CARQYSSSWFPIYYFDYW

SEQ ID NO: 58636 - protein, 21 aa, Homo sapiens
CARDGWFGDLSRLSNDAFDIW

SEQ ID NO: 58637 - protein, 16 aa, Homo sapiens
CARDSSGSYRSRFDPW

SEQ ID NO: 58638 - protein, 18 aa, Homo sapiens
CARDGTLDSGYDLGIDYW

SEQ ID NO: 58639 - protein, 18 aa, Homo sapiens
CARGELTYSSRHGVFDYW

SEQ ID NO: 58640 - protein, 16 aa, Homo sapiens
CAKDIATAAADGMDVW

SEQ ID NO: 58641 - protein, 24 aa, Homo sapiens
CARDSPLAKEYYDSSGYLPGVDYW

SEQ ID NO: 58642 - protein, 35 aa, Homo sapiens
CALPISATYYCAKQPVGITMVLVALFRDQWYFDHW

SEQ ID NO: 58643 - protein, 20 aa, Homo sapiens
CARGRLATSYSSAWYFFDYW

SEQ ID NO: 58644 - protein, 29 aa, Homo sapiens
CARDRGQISGSCSSTSCQTYYYYYGLDVW

SEQ ID NO: 58645 - protein, 19 aa, Homo sapiens
CARAPLDIVLRVIHAFHIW

SEQ ID NO: 58646 - protein, 22 aa, Homo sapiens
CASGGGVLWFGALLPDNWFDPW

SEQ ID NO: 58647 - protein, 20 aa, Homo sapiens
CAKDGPYDFVWGRYRYFDRW

SEQ ID NO: 58648 - protein, 21 aa, Homo sapiens
CATGIPRGVWGGPTFYSFDTW

SEQ ID NO: 58649 - protein, 15 aa, Homo sapiens
CARGDDYGDYAFHYW

SEQ ID NO: 58650 - protein, 22 aa, Homo sapiens
CARSTIPAAREYYYYYYGMDVW

SEQ ID NO: 58651 - protein, 18 aa, Homo sapiens
CARHLLGLGISWAAFDIW

SEQ ID NO: 58652 - protein, 21 aa, Homo sapiens
CAKVLITYYYDSSGPPLWDYW

SEQ ID NO: 58653 - protein, 16 aa, Homo sapiens
CARGNSGAKGDAFDIW

SEQ ID NO: 58654 - protein, 21 aa, Homo sapiens
CARGGRYFDWLVPITNIFDYW

SEQ ID NO: 58655 - protein, 16 aa, Homo sapiens
CAHFIVALHRYYFDYW

SEQ ID NO: 58656 - protein, 22 aa, Homo sapiens
CARADEIAVAIFTYYYYGMDVW

SEQ ID NO: 58657 - protein, 20 aa, Homo sapiens
CAKDDLMHIVVVPAASFDYW

SEQ ID NO: 58658 - protein, 22 aa, Homo sapiens
CARDTAPLVIALSGYYYGMDVW

SEQ ID NO: 58659 - protein, 19 aa, Homo sapiens
CARHDRRWLQLRPSPFDYW

SEQ ID NO: 58660 - protein, 17 aa, Homo sapiens
CARDPHQLVPIGWFDPW

SEQ ID NO: 58661 - protein, 12 aa, Homo sapiens
CAILGYDGYDYW

SEQ ID NO: 58662 - protein, 16 aa, Homo sapiens
CARSYVVVTALPFDYW

SEQ ID NO: 58663 - protein, 23 aa, Homo sapiens
CARGPVMFGELLTSLYYYGMDVW

SEQ ID NO: 58664 - protein, 16 aa, Homo sapiens
CARGPRIQLWLGFDYW

SEQ ID NO: 58665 - protein, 19 aa, Homo sapiens
CAKEHVLMTTVTNNWFDPW

SEQ ID NO: 58666 - protein, 25 aa, Homo sapiens
CARDMQKHYGASDKSVTGAGPFDIW

SEQ ID NO: 58667 - protein, 14 aa, Homo sapiens
CARGDGSGSLDDYW

SEQ ID NO: 58668 - protein, 19 aa, Homo sapiens
CAKVGNYDILTGYSYFDYW

SEQ ID NO: 58669 - protein, 14 aa, Homo sapiens
CARTYDSRRPLDYW

SEQ ID NO: 58670 - protein, 22 aa, Homo sapiens
CARLVVVPAAPGIYYYYGMDVW

SEQ ID NO: 58671 - protein, 20 aa, Homo sapiens
CAKDGVRGVIRSSTTYFDYW

SEQ ID NO: 58672 - protein, 13 aa, Homo sapiens
CAHHRITPIFDYW

SEQ ID NO: 58673 - protein, 23 aa, Homo sapiens
CATYLSQELAVPPSQKDDSFDLW

SEQ ID NO: 58674 - protein, 14 aa, Homo sapiens
CARIQHGGNPFDYW

SEQ ID NO: 58675 - protein, 16 aa, Homo sapiens
CARTSDYGDSGPFDPW

SEQ ID NO: 58676 - protein, 20 aa, Homo sapiens
CARGRGRLLRYFDHNWFDPW

SEQ ID NO: 58677 - protein, 16 aa, Homo sapiens
CARGVVGMASYYFDYW

SEQ ID NO: 58678 - protein, 21 aa, Homo sapiens
CASPYDSSGNINFYYYGMDVW

SEQ ID NO: 58679 - protein, 20 aa, Homo sapiens
CARGGGGSGWYTELSWFDPW

SEQ ID NO: 58680 - protein, 14 aa, Homo sapiens
CVRVADTPMGRDYW

SEQ ID NO: 58681 - protein, 16 aa, Homo sapiens
CAKDGRRLILTACDYW

SEQ ID NO: 58682 - protein, 22 aa, Homo sapiens
CARSPRQQWLVLGGYYYGMDVW

SEQ ID NO: 58683 - protein, 16 aa, Homo sapiens
CAHRRQTFWGPNFDYW

SEQ ID NO: 58684 - protein, 20 aa, Homo sapiens
CARDDGGVNSSGWGFLLDYW

SEQ ID NO: 58685 - protein, 21 aa, Homo sapiens
CAKDQSSSSWYDFYYYGMDVW

SEQ ID NO: 58686 - protein, 19 aa, Homo sapiens
CARGYSSSWYPYLYYFDYW

SEQ ID NO: 58687 - protein, 13 aa, Homo sapiens
CQQYDNLLSGYSF

SEQ ID NO: 58688 - protein, 23 aa, Homo sapiens
CAKDSVGSGSYYNSHYYYGMDVW

SEQ ID NO: 58689 - protein, 17 aa, Homo sapiens
CARPRSSWYHYYAMDVW

SEQ ID NO: 58690 - protein, 23 aa, Homo sapiens
CARISYYGGNSIVNYYYYGMDVW

SEQ ID NO: 58691 - protein, 17 aa, Homo sapiens
CARGAVTPPRYWYFDLW

SEQ ID NO: 58692 - protein, 17 aa, Homo sapiens
CAKGEDFEELLSPFDYW

SEQ ID NO: 58693 - protein, 22 aa, Homo sapiens
CARVEYYYDSSGYPYYWYFDLW

SEQ ID NO: 58694 - protein, 16 aa, Homo sapiens
CARDDGDYGETHLDYW

SEQ ID NO: 58695 - protein, 18 aa, Homo sapiens
CAKDSPRDGYSGYYFDLW

SEQ ID NO: 58696 - protein, 18 aa, Homo sapiens
CARDDAGGIVVVTHFDYW

SEQ ID NO: 58697 - protein, 25 aa, Homo sapiens
CARGGWLRTDRVDTAMVLFNWFDPW

SEQ ID NO: 58698 - protein, 23 aa, Homo sapiens
CARDRRRGTGWGSYYYYYGMDVW

SEQ ID NO: 58699 - protein, 17 aa, Homo sapiens
CARDFDPSGYSYGFDYW

SEQ ID NO: 58700 - protein, 21 aa, Homo sapiens
CTTDSTPGIAVAGIHTAGDYW

SEQ ID NO: 58701 - protein, 21 aa, Homo sapiens
CARDYPRIAVAGWDDWYFDLW

SEQ ID NO: 58702 - protein, 23 aa, Homo sapiens
CARDDEWLEIGELYYYYYGMDVW

SEQ ID NO: 58703 - protein, 24 aa, Homo sapiens
CARDCARGDYYDSSGYYSDAFDIW

SEQ ID NO: 58704 - protein, 13 aa, Homo sapiens
CARSYSGSYGGYW

SEQ ID NO: 58705 - protein, 17 aa, Homo sapiens
CARDLTVTNPDNWFDPW

SEQ ID NO: 58706 - protein, 18 aa, Homo sapiens
CARHSIWGGITPYYFDYW

SEQ ID NO: 58707 - protein, 21 aa, Homo sapiens
CALPISAVYYCARGLDAFDVW

SEQ ID NO: 58708 - protein, 15 aa, Homo sapiens
CAKSKEIAAAATDYW

SEQ ID NO: 58709 - protein, 17 aa, Homo sapiens
CARGRDYDITTPNFDYW

SEQ ID NO: 58710 - protein, 16 aa, Homo sapiens
CAHSFWRFGELSYDYW

SEQ ID NO: 58711 - protein, 22 aa, Homo sapiens
CAKVGGSGSYYKLIGLTYFDFW

SEQ ID NO: 58712 - protein, 19 aa, Homo sapiens
CATPPGEDYYGSGRDFDYW

SEQ ID NO: 58713 - protein, 14 aa, Homo sapiens
CARGVWGRLPRDYW

SEQ ID NO: 58714 - protein, 24 aa, Homo sapiens
CAKDSEVVARQKDYYYYYYGMDVW

SEQ ID NO: 58715 - protein, 18 aa, Homo sapiens
CARLSSKAFYSGTYWDYW

SEQ ID NO: 58716 - protein, 16 aa, Homo sapiens
CARSPLYYYDSHVDYW

SEQ ID NO: 58717 - protein, 27 aa, Homo sapiens
CARDQGGRWLQLGPGFESPVYNWFDPW

SEQ ID NO: 58718 - protein, 21 aa, Homo sapiens
CASKGEDTAMVLYYYYGMDVW

SEQ ID NO: 58719 - protein, 16 aa, Homo sapiens
CARGTPVAGKGHYDYW

SEQ ID NO: 58720 - protein, 21 aa, Homo sapiens
CARGVRVAVWAYSYVPFFDYW

SEQ ID NO: 58721 - protein, 20 aa, Homo sapiens
CASFGSVGTAWRYADYFDYW

SEQ ID NO: 58722 - protein, 23 aa, Homo sapiens
CAKTPDMITFGGVIVRGGYFDYW

SEQ ID NO: 58723 - protein, 15 aa, Homo sapiens
CARMEVYSGVAFDIW

SEQ ID NO: 58724 - protein, 14 aa, Homo sapiens
CARILHPITAADIW

SEQ ID NO: 58725 - protein, 15 aa, Homo sapiens
CVRDRGVHLWYKDYW

SEQ ID NO: 58726 - protein, 14 aa, Homo sapiens
CAREGVRTRSFDYW

SEQ ID NO: 58727 - protein, 18 aa, Homo sapiens
CARMITFGGVSTPAFDYW

SEQ ID NO: 58728 - protein, 21 aa, Homo sapiens
CARAAPRGYSYVNYYYGMDVW

SEQ ID NO: 58729 - protein, 21 aa, Homo sapiens
CAREGVAAPHGKEGGTHFDYW

SEQ ID NO: 58730 - protein, 20 aa, Homo sapiens
CARGVPQWDPTNLYNWFDPW

SEQ ID NO: 58731 - protein, 18 aa, Homo sapiens
CARAAHNDYGDYWYFDLW

SEQ ID NO: 58732 - protein, 24 aa, Homo sapiens
CAIEGYGSGSYYPSYYYYYGMDVW

SEQ ID NO: 58733 - protein, 14 aa, Homo sapiens
CASSRRGSVWFDPW

SEQ ID NO: 58734 - protein, 15 aa, Homo sapiens
CAHRRLATTGDFDYW

SEQ ID NO: 58735 - protein, 16 aa, Homo sapiens
CASLYYYGSGSYYKYW

SEQ ID NO: 58736 - protein, 24 aa, Homo sapiens
CARVKGLYYYDSSGYYFGDAFDIW

SEQ ID NO: 58737 - protein, 22 aa, Homo sapiens
CARDNYEYNWNDWDGRSWFDPW

SEQ ID NO: 58738 - protein, 15 aa, Homo sapiens
CARIQTFIGSFFDSW

SEQ ID NO: 58739 - protein, 16 aa, Homo sapiens
CAVSDYGDYDLNFDYW

SEQ ID NO: 58740 - protein, 18 aa, Homo sapiens
CARVYCRGYYSHYYFDYW

SEQ ID NO: 58741 - protein, 18 aa, Homo sapiens
CAKDRVGLAAAGSVFDYW

SEQ ID NO: 58742 - protein, 23 aa, Homo sapiens
CAKGDLYYDYVWGSYRLGYFDYW

SEQ ID NO: 58743 - protein, 15 aa, Homo sapiens
CAGPDGDPEIYFDYW

SEQ ID NO: 58744 - protein, 21 aa, Homo sapiens
CARVNYYDSSGYYSYDAFDIW

SEQ ID NO: 58745 - protein, 21 aa, Homo sapiens
CALEWELLPNPPYYYYGMDVW

SEQ ID NO: 58746 - protein, 20 aa, Homo sapiens
CARGTMLRGVITWVGWFDSW

SEQ ID NO: 58747 - protein, 19 aa, Homo sapiens
CAREARRTTVTPHDSFDTW

SEQ ID NO: 58748 - protein, 22 aa, Homo sapiens
CARLVWQQLARGVYYYYGMDVW

SEQ ID NO: 58749 - protein, 15 aa, Homo sapiens
CAKSSGIAPGGFDYW

SEQ ID NO: 58750 - protein, 22 aa, Homo sapiens
CAKVLSSYCSGGSCYGDYFDYW

SEQ ID NO: 58751 - protein, 22 aa, Homo sapiens
CARDMGSWGSPPEYYYYGMDVW

SEQ ID NO: 58752 - protein, 19 aa, Homo sapiens
CARDPSLLLWFGESHFDYW

SEQ ID NO: 58753 - protein, 17 aa, Homo sapiens
CAKGLYSWARDGYPDYW

SEQ ID NO: 58754 - protein, 17 aa, Homo sapiens
CARHYSNSWYFDYFDQW

SEQ ID NO: 58755 - protein, 21 aa, Homo sapiens
CARGGGTMVRGVISISWFDPW

SEQ ID NO: 58756 - protein, 16 aa, Homo sapiens
CTTDEWELPGGAFDIW

SEQ ID NO: 58757 - protein, 21 aa, Homo sapiens
CARGGAFGGVIVIPEYYFDYW

SEQ ID NO: 58758 - protein, 16 aa, Homo sapiens
CAHRQNWVRGGSFDYW

SEQ ID NO: 58759 - protein, 25 aa, Homo sapiens
CAKVVGLSTHRSSGWSGGGYYFDYW

SEQ ID NO: 58760 - protein, 28 aa, Homo sapiens
CARLAGYCSGGSCYRPPYTPQGGWLDPW

SEQ ID NO: 58761 - protein, 22 aa, Homo sapiens
CATSYYYGATAYYVDQYYFDYW

SEQ ID NO: 58762 - protein, 10 aa, Homo sapiens [sequence omitted]

SEQ ID NO: 58763 - protein, 21 aa, Homo sapiens
CARSHCSSTSCYEELDWFDPW

SEQ ID NO: 58764 - protein, 19 aa, Homo sapiens
CARLELQLWLLGPTGFDYW

SEQ ID NO: 58765 - protein, 15 aa, Homo sapiens
CSAYYSGYDLTFDYW

SEQ ID NO: 58766 - protein, 20 aa, Homo sapiens
CARDGPYYYDSSGYLPFDNW

SEQ ID NO: 58767 - protein, 18 aa, Homo sapiens
CARQRYNSGWYMFWFDPW

SEQ ID NO: 58768 - protein, 11 aa, Homo sapiens
CLQDSNYAGTF

SEQ ID NO: 58769 - protein, 16 aa, Homo sapiens
CAKDREAEMATLFDYW

SEQ ID NO: 58770 - protein, 16 aa, Homo sapiens
CARTFDESGLSRFDPW

SEQ ID NO: 58771 - protein, 17 aa, Homo sapiens
CARGSSHYDGKLPHDYW

SEQ ID NO: 58772 - protein, 18 aa, Homo sapiens
CARPRRSGSGYQDYFDYW

SEQ ID NO: 58773 - protein, 25 aa, Homo sapiens
CAKDYYDSSGYYYGGYYYYYGMDVW

SEQ ID NO: 58774 - protein, 15 aa, Homo sapiens
CAGSIAAAVPGLDYW

SEQ ID NO: 58775 - protein, 19 aa, Homo sapiens
CARSSTKLYSGTEGALDVW

SEQ ID NO: 58776 - protein, 21 aa, Homo sapiens
CARLRIAAAGIWGPKYYFDYW

SEQ ID NO: 58777 - protein, 19 aa, Homo sapiens
CARDLAYSSGWYTGWFDPW

SEQ ID NO: 58778 - protein, 14 aa, Homo sapiens
CQLTDSSGVYSVAF

SEQ ID NO: 58779 - protein, 22 aa, Homo sapiens
CARGGVVGATQRLRYYYGMDVW

SEQ ID NO: 58780 - protein, 17 aa, Homo sapiens
CVRQGPYSSYVEFFDFW

SEQ ID NO: 58781 - protein, 17 aa, Homo sapiens
CARRKGWHSSGWSLDYW

SEQ ID NO: 58782 - protein, 20 aa, Homo sapiens
CARTSWYESSGYPRWYFDYW

SEQ ID NO: 58783 - protein, 20 aa, Homo sapiens
CAPGGLRYFDWLLPPNFDYW

SEQ ID NO: 58784 - protein, 16 aa, Homo sapiens
CAKNLWGSGWSHFDSW

SEQ ID NO: 58785 - protein, 15 aa, Homo sapiens
CAREIVAATRNFDIW

SEQ ID NO: 58786 - protein, 17 aa, Homo sapiens
CATATAMRVATNWFDPW

SEQ ID NO: 58787 - protein, 15 aa, Homo sapiens
CASGRRDSSSCFDYW

SEQ ID NO: 58788 - protein, 13 aa, Homo sapiens
CARGFHGSRYDYW

SEQ ID NO: 58789 - protein, 26 aa, Homo sapiens
CAREKIPIVGATTWDYYYYYYGMDVW

SEQ ID NO: 58790 - protein, 16 aa, Homo sapiens
CAHRLRGKGSIAFDVW

SEQ ID NO: 58791 - protein, 14 aa, Homo sapiens
CAKLQSVTDGFDYW

SEQ ID NO: 58792 - protein, 25 aa, Homo sapiens
CARLPRRWLQLLGPKTYYYYGMDVW

SEQ ID NO: 58793 - protein, 18 aa, Homo sapiens
CARDRPSSSWYFGLIDYW

SEQ ID NO: 58794 - protein, 15 aa, Homo sapiens
CARDERWGGEAADYW

SEQ ID NO: 58795 - protein, 22 aa, Homo sapiens
CARGAVLWQWPLKINAEYFQHW

SEQ ID NO: 58796 - protein, 15 aa, Homo sapiens
CARRTPPTPHAFDIW

SEQ ID NO: 58797 - protein, 16 aa, Homo sapiens
CARETVDTAMPRADYW

SEQ ID NO: 58798 - protein, 17 aa, Homo sapiens
CAHIKAAASSWYYFDYW

SEQ ID NO: 58799 - protein, 15 aa, Homo sapiens
CAKVMSGWDDAFDIW

SEQ ID NO: 58800 - protein, 14 aa, Homo sapiens
CAKGKLVSLLFDYW

SEQ ID NO: 58801 - protein, 23 aa, Homo sapiens
CARDSTPTYYYGSGSWENAFDIW

SEQ ID NO: 58802 - protein, 15 aa, Homo sapiens
CAHGDWLTRADFDYW

SEQ ID NO: 58803 - protein, 22 aa, Homo sapiens
CARDKYCSSTSCYLNFGAFDIW

SEQ ID NO: 58804 - protein, 18 aa, Homo sapiens
CARYKAYYDISAYYFDYW

SEQ ID NO: 58805 - protein, 17 aa, Homo sapiens
CAKEGYGSSWYNAFDIW

SEQ ID NO: 58806 - protein, 18 aa, Homo sapiens
CARGWGYSSSWYGLYDYW

SEQ ID NO: 58807 - protein, 16 aa, Homo sapiens
CAKTDSGSYSGGFDYW

SEQ ID NO: 58808 - protein, 17 aa, Homo sapiens
CATDIPRDLGELLPDYW

SEQ ID NO: 58809 - protein, 22 aa, Homo sapiens
CATYYYDSSGYYHGGGDAFDIW

SEQ ID NO: 58810 - protein, 14 aa, Homo sapiens
CARTVAGTLGIDYW

SEQ ID NO: 58811 - protein, 20 aa, Homo sapiens
CARGDKLAYCGGDCLYFDYW

SEQ ID NO: 58812 - protein, 15 aa, Homo sapiens
CRGHGDYELNAFDIW

SEQ ID NO: 58813 - protein, 22 aa, Homo sapiens
CAKDTRRSYGSGRGYYYGMDVW

SEQ ID NO: 58814 - protein, 16 aa, Homo sapiens
CGRTWIEEFSPDFDYW

SEQ ID NO: 58815 - protein, 24 aa, Homo sapiens
CARAAKYRLLLWFGELWGYYFDYW

SEQ ID NO: 58816 - protein, 14 aa, Homo sapiens
CAKDYGDYGGLDYW

SEQ ID NO: 58817 - protein, 23 aa, Homo sapiens
CARDQVGDYYDSSGYYLYGMDVW

SEQ ID NO: 58818 - protein, 20 aa, Homo sapiens
CARLNHMGYSYGHQPDFDYW

SEQ ID NO: 58819 - protein, 23 aa, Homo sapiens
CARDQHLLLWFGEFPPYWYFDLW

SEQ ID NO: 58820 - protein, 17 aa, Homo sapiens
CARHWSYSGSYNWFDPW

SEQ ID NO: 58821 - protein, 20 aa, Homo sapiens
CARSSYFGSGSYSNNWFDPW

SEQ ID NO: 58822 - protein, 17 aa, Homo sapiens
CAKVQIAYSNSAPFDFW

SEQ ID NO: 58823 - protein, 18 aa, Homo sapiens
CASTIVVIPSGLYYFDYW

SEQ ID NO: 58824 - protein, 23 aa, Homo sapiens
CARHLKGGSYYGGPYYYYGMDVW

SEQ ID NO: 58825 - protein, 18 aa, Homo sapiens
CARAPQWELLYVDAFDLW

SEQ ID NO: 58826 - protein, 21 aa, Homo sapiens
CARDGFTYQWLVSGVCYFDYW

SEQ ID NO: 58827 - protein, 19 aa, Homo sapiens
CAKDLGRSGSHYDVGFDYW

SEQ ID NO: 58828 - protein, 14 aa, Homo sapiens
CARMVAASAMYDYW

SEQ ID NO: 58829 - protein, 20 aa, Homo sapiens
CARDPAAGILAYYYYGMDVW

SEQ ID NO: 58830 - protein, 20 aa, Homo sapiens
CARDGSAYPYYYYYYGMDVW

SEQ ID NO: 58831 - protein, 23 aa, Homo sapiens
CARDRSTLGYALELKKAYWFDPW

SEQ ID NO: 58832 - protein, 17 aa, Homo sapiens
CARESSGWYGRGAFDIW

SEQ ID NO: 58833 - protein, 17 aa, Homo sapiens
CAREWGGSGWYGTNDYW

SEQ ID NO: 58834 - protein, 21 aa, Homo sapiens
CARVYSSIPTNWFYYYGMDVW

SEQ ID NO: 58835 - protein, 17 aa, Homo sapiens
CARYNYRGRGGNWFDPW

SEQ ID NO: 58836 - protein, 23 aa, Homo sapiens
CARDQVLSWFAGSPRDTGGFDYW

SEQ ID NO: 58837 - protein, 12 aa, Homo sapiens
CARGYIYAFDPW

SEQ ID NO: 58838 - protein, 22 aa, Homo sapiens
CARDRGYYDSSGYYSSEGCDYW

SEQ ID NO: 58839 - protein, 23 aa, Homo sapiens
CARLGYGGISRGYYYYYYGMDVW

SEQ ID NO: 58840 - protein, 17 aa, Homo sapiens
CARDRAFTGYDSYFEIW

SEQ ID NO: 58841 - protein, 19 aa, Homo sapiens
CARHDIVVVVAATGAFDIW

SEQ ID NO: 58842 - protein, 23 aa, Homo sapiens
CARSFVYYNDGSDYYSPGGPDYW

SEQ ID NO: 58843 - protein, 17 aa, Homo sapiens
CAREFSEMATLHWFDPW

SEQ ID NO: 58844 - protein, 21 aa, Homo sapiens
CARDMVAAAGTSLYYYGMDVW

SEQ ID NO: 58845 - protein, 17 aa, Homo sapiens
CARHYGDYVHDLAFDIW

SEQ ID NO: 58846 - protein, 16 aa, Homo sapiens
CALGGYFDWLLELDYW

SEQ ID NO: 58847 - protein, 24 aa, Homo sapiens
CARGTYSSSWSNRVLRHWWYFDLW

SEQ ID NO: 58848 - protein, 26 aa, Homo sapiens
CARVMDYYDSSGYYYGSYYYYGMDVW

SEQ ID NO: 58849 - protein, 15 aa, Homo sapiens
CARGGSNDLGIEDYW

SEQ ID NO: 58850 - protein, 24 aa, Homo sapiens
CAREGLGYNIEAATYYYYYGMDVW

SEQ ID NO: 58851 - protein, 20 aa, Homo sapiens
CAHRAPYYYYGSGSYEFDYW

SEQ ID NO: 58852 - protein, 18 aa, Homo sapiens
CAGGWNFVYSRGEYFQHW

SEQ ID NO: 58853 - protein, 20 aa, Homo sapiens
CAKAPEGVRWLQAEYYFDYW

SEQ ID NO: 58854 - protein, 18 aa, Homo sapiens
CASAGVVVAHGRWYFDLW

SEQ ID NO: 58855 - protein, 16 aa, Homo sapiens
CARDRGDSSGWSFDYW

SEQ ID NO: 58856 - protein, 27 aa, Homo sapiens
CARDRRCSGPSCDSPRAYYYLYGMDVW

SEQ ID NO: 58857 - protein, 22 aa, Homo sapiens
CARDYRSRYSSGWYHPPHFDYW

SEQ ID NO: 58858 - protein, 19 aa, Homo sapiens
CVRQLYFVHGGEHWYIDLW

SEQ ID NO: 58859 - protein, 11 aa, Homo sapiens
CQQYGDPPGAF

SEQ ID NO: 58860 - protein, 17 aa, Homo sapiens
CARDTPDLSPTGTRDYW

SEQ ID NO: 58861 - protein, 21 aa, Homo sapiens
CAYSISSSWPPYYYYYGMDVW

SEQ ID NO: 58862 - protein, 23 aa, Homo sapiens
CARAVNWSYYYGSGSYHNWFDPW

SEQ ID NO: 58863 - protein, 15 aa, Homo sapiens
CARDRDDILGGFDYW

SEQ ID NO: 58864 - protein, 19 aa, Homo sapiens
CTRAPVYGSGRYLPFFEYW

SEQ ID NO: 58865 - protein, 17 aa, Homo sapiens
CAKGTVAGIKAEYFQHW

SEQ ID NO: 58866 - protein, 20 aa, Homo sapiens
CARDYRIQLWLTVDYYFDYW

SEQ ID NO: 58867 - protein, 17 aa, Homo sapiens
CARDVTGDKRDQRFDYW

SEQ ID NO: 58868 - protein, 18 aa, Homo sapiens
CARGITHFFSDGGPFDYW

SEQ ID NO: 58869 - protein, 22 aa, Homo sapiens
CARLVVTMIVGSPYYYYGMDVW

SEQ ID NO: 58870 - protein, 17 aa, Homo sapiens
CAKDYGDYALGDGFDLW

SEQ ID NO: 58871 - protein, 24 aa, Homo sapiens
CARGGEYRGYDFRGDYVDHWFDPW

SEQ ID NO: 58872 - protein, 15 aa, Homo sapiens
CAKDGGLPHHCFDSW

SEQ ID NO: 58873 - protein, 28 aa, Homo sapiens
CARYYYYDSSGYRGVGSDGAYFDAFDIW

SEQ ID NO: 58874 - protein, 16 aa, Homo sapiens
CAHRLGGYASSYFDYW

SEQ ID NO: 58875 - protein, 15 aa, Homo sapiens
CAKDGGWLVRDFDYW

SEQ ID NO: 58876 - protein, 15 aa, Homo sapiens
CAHRVVPAPYYFDYW

SEQ ID NO: 58877 - protein, 17 aa, Homo sapiens
CASTSYDFGSTGVFDYW

SEQ ID NO: 58878 - protein, 12 aa, Homo sapiens
CQQTYSSPPFNF

SEQ ID NO: 58879 - protein, 24 aa, Homo sapiens
CARGRIAAAGTLEVIYYYYGMDVW

SEQ ID NO: 58880 - protein, 21 aa, Homo sapiens
CAREGLGYCSSTSCFSAFDIW

SEQ ID NO: 58881 - protein, 12 aa, Homo sapiens
CATLSTDWFDPW

SEQ ID NO: 58882 - protein, 21 aa, Homo sapiens
CTTLGGYSYGYSDYYYGMDVW

SEQ ID NO: 58883 - protein, 17 aa, Homo sapiens
CAKDIVHFSDSGGFDYW

SEQ ID NO: 58884 - protein, 21 aa, Homo sapiens
CARLTFGYSSGWYHYYGMDVW

SEQ ID NO: 58885 - protein, 22 aa, Homo sapiens
CARLRAGYCSSTSCPAPYFQHW

SEQ ID NO: 58886 - protein, 21 aa, Homo sapiens
CARVRLYCSSTSCYSPIFDIW

SEQ ID NO: 58887 - protein, 16 aa, Homo sapiens
CARALEKAASGSFDFW

SEQ ID NO: 58888 - protein, 14 aa, Homo sapiens
CARSYLTTVPFDSW

SEQ ID NO: 58889 - protein, 15 aa, Homo sapiens
CARGTTVMPPEFDYW

SEQ ID NO: 58890 - protein, 17 aa, Homo sapiens
CARDSLPLILTGWFDPW

SEQ ID NO: 58891 - protein, 21 aa, Homo sapiens
CAHSKLRYFDWLGAHDAFDIW

SEQ ID NO: 58892 - protein, 21 aa, Homo sapiens
CARDNQVYYDILTGQDAFDIW

SEQ ID NO: 58893 - protein, 17 aa, Homo sapiens
CAKVGSPTVTTWYFDYW

SEQ ID NO: 58894 - protein, 22 aa, Homo sapiens
CARVHLYCSGGSCYSGYYFDYW

SEQ ID NO: 58895 - protein, 23 aa, Homo sapiens
CARITMVRGVTWVYYYYYGMDVW

SEQ ID NO: 58896 - protein, 22 aa, Homo sapiens
CATDQRVDTAIEYYYYYGMDVW

SEQ ID NO: 58897 - protein, 15 aa, Homo sapiens
CAHTPDPSGNQFDYW

SEQ ID NO: 58898 - protein, 21 aa, Homo sapiens
CARGGGGITMVRGVITYFDYW

SEQ ID NO: 58899 - protein, 28 aa, Homo sapiens
CARDFWPSHADYDILTGYYKEGSPRDYW

SEQ ID NO: 58900 - protein, 23 aa, Homo sapiens
CARDREYSSSWYAIYYYYGMDVW

SEQ ID NO: 58901 - protein, 16 aa, Homo sapiens
CAKDEDSGYYFYRGYW

SEQ ID NO: 58902 - protein, 18 aa, Homo sapiens
CVKDPETGGLGINYFDYW

SEQ ID NO: 58903 - protein, 24 aa, Homo sapiens
CARVLHYYDSSGPRRSVKWYFDLW

SEQ ID NO: 58904 - protein, 22 aa, Homo sapiens
CARDLQRELLVALYYYYGMDVW

SEQ ID NO: 58905 - protein, 17 aa, Homo sapiens
CAKADHGGTTEYYFDYW

SEQ ID NO: 58906 - protein, 22 aa, Homo sapiens
CARDLVDIVATMFYYYYGMDVW

SEQ ID NO: 58907 - protein, 14 aa, Homo sapiens
CARNYGGTKPFDIW

SEQ ID NO: 58908 - protein, 20 aa, Homo sapiens
CATHLQHGSGSYQPLKFDYW

SEQ ID NO: 58909 - protein, 12 aa, Homo sapiens [sequence omitted]

SEQ ID NO: 58910 - protein, 18 aa, Homo sapiens
CARDRGTVVPFLDAFDIW

SEQ ID NO: 58911 - protein, 15 aa, Homo sapiens
CARNQWSSLLKVDYW

SEQ ID NO: 58912 - protein, 19 aa, Homo sapiens
CAHDTYHYDNNGYYPFDYW

SEQ ID NO: 58913 - protein, 16 aa, Homo sapiens
CAKASSSSWYGAFDIW

SEQ ID NO: 58914 - protein, 16 aa, Homo sapiens
CAKVVDSGYADGMDVW

SEQ ID NO: 58915 - protein, 23 aa, Homo sapiens
CARDIGDGPSVYSYGYYNWFDPW

SEQ ID NO: 58916 - protein, 24 aa, Homo sapiens
CAKDRPPLWFGELLYPGYYGMDVW

SEQ ID NO: 58917 - protein, 14 aa, Homo sapiens
CALLVGATTRGDYW

SEQ ID NO: 58918 - protein, 17 aa, Homo sapiens
CARDNGFIPTHDAFDIW

SEQ ID NO: 58919 - protein, 22 aa, Homo sapiens
CARDLTSTVVTAGDYYYGMDVW

SEQ ID NO: 58920 - protein, 15 aa, Homo sapiens
CAHYDSSGYLIFDYW

SEQ ID NO: 58921 - protein, 14 aa, Homo sapiens
CVRQFYGDYGFDFW

SEQ ID NO: 58922 - protein, 20 aa, Homo sapiens
CARGSDPIPGIAGDWYFDLW

SEQ ID NO: 58923 - protein, 21 aa, Homo sapiens
CARLAVRGGYYSFYYYGMDVW

SEQ ID NO: 58924 - protein, 20 aa, Homo sapiens
CARASYCGGDCYSNWYFDLW

SEQ ID NO: 58925 - protein, 13 aa, Homo sapiens
CAHRHGSGYFDLW

SEQ ID NO: 58926 - protein, 18 aa, Homo sapiens
CARIPRWGSWYDTEFDYW

SEQ ID NO: 58927 - protein, 17 aa, Homo sapiens
CARDASGYDWGLYFDYW

SEQ ID NO: 58928 - protein, 15 aa, Homo sapiens
CARGWELRGYYFDYW

SEQ ID NO: 58929 - protein, 21 aa, Homo sapiens
CARAGIRGFTVGLRYYALDVW

SEQ ID NO: 58930 - protein, 15 aa, Homo sapiens
CARAPISYDTWFDPW

SEQ ID NO: 58931 - protein, 22 aa, Homo sapiens
CARDGLHYDILTGYQYYGMDVW

SEQ ID NO: 58932 - protein, 17 aa, Homo sapiens
CVYCSGGNYYYYGMDVW

SEQ ID NO: 58933 - protein, 22 aa, Homo sapiens
CARDSSVATTLSGAYYYGMDVW

SEQ ID NO: 58934 - protein, 20 aa, Homo sapiens
CAHRDTFDGSWQRTDAFDIW

SEQ ID NO: 58935 - protein, 18 aa, Homo sapiens
CAKVLYSYGYGQSIWDYW

SEQ ID NO: 58936 - protein, 21 aa, Homo sapiens
CASGGAPTSMRKYYYYGMGVW

SEQ ID NO: 58937 - protein, 24 aa, Homo sapiens
CARSGWSRGGYCSSTSCFNWFDPW

SEQ ID NO: 58938 - protein, 17 aa, Homo sapiens
CAHRHVIHYYGSGFDYW

SEQ ID NO: 58939 - protein, 26 aa, Homo sapiens
CARSGDIVATMFRGRAALYYYGMDVW

SEQ ID NO: 58940 - protein, 21 aa, Homo sapiens
CATDHTSGSFYENYYYGMDVW

SEQ ID NO: 58941 - protein, 18 aa, Homo sapiens
CARVFGQLNYFYHGFDVW

SEQ ID NO: 58942 - protein, 17 aa, Homo sapiens
CASTQVLGATQELVDYW

SEQ ID NO: 58943 - protein, 17 aa, Homo sapiens
CARELGVAAAGRWFDPW

SEQ ID NO: 58944 - protein, 19 aa, Homo sapiens
CARGWGYSSGWQRWAFDIW

SEQ ID NO: 58945 - protein, 20 aa, Homo sapiens
CARDMEAHIGQQLHDAFDIW

SEQ ID NO: 58946 - protein, 17 aa, Homo sapiens
CARSRYTSGTVWYFDLW

SEQ ID NO: 58947 - protein, 16 aa, Homo sapiens
CAKLPREGPDDAFDIW

SEQ ID NO: 58948 - protein, 13 aa, Homo sapiens
CASSWGWYAFDRW

SEQ ID NO: 58949 - protein, 21 aa, Homo sapiens
CARLRMATITLSYYYYGMDVW

SEQ ID NO: 58950 - protein, 19 aa, Homo sapiens
CARADDSSWMTGEHVFDTW

SEQ ID NO: 58951 - protein, 24 aa, Homo sapiens
CATSLPLFSGYDLNYYYYYGMDVW

SEQ ID NO: 58952 - protein, 16 aa, Homo sapiens
CVRLWFGELFDWFDPW

SEQ ID NO: 58953 - protein, 15 aa, Homo sapiens
CALAGYGGNFWIDYW

SEQ ID NO: 58954 - protein, 22 aa, Homo sapiens
CTTDQIGENDYGDLRTAGFDYW

SEQ ID NO: 58955 - protein, 19 aa, Homo sapiens
CAKEGVRYFDWEEDAFDIW

SEQ ID NO: 58956 - protein, 13 aa, Homo sapiens
CARQDYHFWLDPW

SEQ ID NO: 58957 - protein, 22 aa, Homo sapiens
CATDSIEMATITDYYYYGMDVW

SEQ ID NO: 58958 - protein, 19 aa, Homo sapiens
CARDTRVAAVILRGAFDIW

SEQ ID NO: 58959 - protein, 16 aa, Homo sapiens
CTTEHIVVATDAFDIW

SEQ ID NO: 58960 - protein, 21 aa, Homo sapiens
CTRVPLTYEHKGIGYPYFDFW

SEQ ID NO: 58961 - protein, 16 aa, Homo sapiens
CAHSKEGWFGDWFDPW

SEQ ID NO: 58962 - protein, 23 aa, Homo sapiens
CARDSVVTAIHTDYYYYYGMDVW

SEQ ID NO: 58963 - protein, 22 aa, Homo sapiens
CARGGWYRGVIISYSLSAFDIW

SEQ ID NO: 58964 - protein, 24 aa, Homo sapiens
CAKGERMTTVPNEDYYYYYGMDVW

SEQ ID NO: 58965 - protein, 22 aa, Homo sapiens
CARELFEQLVQGVYYYYGMDVW

SEQ ID NO: 58966 - protein, 21 aa, Homo sapiens
CARHPFYCSSTSCYEVWFDPW

SEQ ID NO: 58967 - protein, 20 aa, Homo sapiens
CGYSRTAVAGTAILHWFDPW

SEQ ID NO: 58968 - protein, 20 aa, Homo sapiens
CAKDFRLSMIVVVITYFDYW

SEQ ID NO: 58969 - protein, 17 aa, Homo sapiens
CAKDRRDRWYPSYFDYW

SEQ ID NO: 58970 - protein, 25 aa, Homo sapiens
CAKQPGEITIIMVARFRDQWYFDLW

SEQ ID NO: 58971 - protein, 19 aa, Homo sapiens
CARHMRSGDYVSLLVLDYW

SEQ ID NO: 58972 - protein, 24 aa, Homo sapiens
CAKDRLGYCSSTSCYGGTNWFDPW

SEQ ID NO: 58973 - protein, 17 aa, Homo sapiens
CAHRRSSGWYGDWFDPW

SEQ ID NO: 58974 - protein, 22 aa, Homo sapiens
CARQTVEPTLPGVYYYYGMDVW

SEQ ID NO: 58975 - protein, 20 aa, Homo sapiens
CATADIVATIWNYYYGMDVW

SEQ ID NO: 58976 - protein, 20 aa, Homo sapiens
CARAGSRGESSYYYYGMDVW

SEQ ID NO: 58977 - protein, 19 aa, Homo sapiens
CARAAYLRYFDWTPAFDYW

SEQ ID NO: 58978 - protein, 15 aa, Homo sapiens
CARQDGDYTPWFDPW

SEQ ID NO: 58979 - protein, 21 aa, Homo sapiens
CAKGGYDEPTPAYYYYGMDVW

SEQ ID NO: 58980 - protein, 16 aa, Homo sapiens
CARLRATMSVFYFDYW

SEQ ID NO: 58981 - protein, 17 aa, Homo sapiens
CAREQVDYGGNSDFDYW

SEQ ID NO: 58982 - protein, 12 aa, Homo sapiens
CQSYDHRNFWVF

SEQ ID NO: 58983 - protein, 16 aa, Homo sapiens
CARDGLWGRTVHFDYW

SEQ ID NO: 58984 - protein, 22 aa, Homo sapiens
CARDKSSYYDILTGYYYGMDVW

SEQ ID NO: 58985 - protein, 21 aa, Homo sapiens
CARDWGQWELLQYYYYGMDVW

SEQ ID NO: 58986 - protein, 17 aa, Homo sapiens
CAHRLIILTASGAFDIW

SEQ ID NO: 58987 - protein, 23 aa, Homo sapiens
CASGYYDILTGYYAYYYYGMDVW

SEQ ID NO: 58988 - protein, 16 aa, Homo sapiens
CAHRPVLAATGGFDPW

SEQ ID NO: 58989 - protein, 22 aa, Homo sapiens
CARFRGSMVTMYDYYYYGMDVW

SEQ ID NO: 58990 - protein, 18 aa, Homo sapiens
CTSILRIYYYGSGSYDYW

SEQ ID NO: 58991 - protein, 16 aa, Homo sapiens
CARPHGGHYRGDFDYW

SEQ ID NO: 58992 - protein, 19 aa, Homo sapiens
CASMLGDGYSPWQNAFDIW

SEQ ID NO: 58993 - protein, 15 aa, Homo sapiens
CAKFDGSGWYSGDYW

SEQ ID NO: 58994 - protein, 22 aa, Homo sapiens
CARDVVYGDYALEYYATAFDIW

SEQ ID NO: 58995 - protein, 16 aa, Homo sapiens
CARTAAYDSSGPFDSW

SEQ ID NO: 58996 - protein, 14 aa, Homo sapiens
CAREVLGIEAFQYW

SEQ ID NO: 58997 - protein, 21 aa, Homo sapiens
CATGPYYYDSSGYYHGPFDYW

SEQ ID NO: 58998 - protein, 22 aa, Homo sapiens
CARDQYYYDSSGYLYYYGMDVW

SEQ ID NO: 58999 - protein, 21 aa, Homo sapiens
CAKWSGADPAYSSGWYYFDYW

SEQ ID NO: 59000 - protein, 17 aa, Homo sapiens
CAKVAGHSRTWHYIDLW

SEQ ID NO: 59001 - protein, 19 aa, Homo sapiens
CAKHATTVTIGRVFGFDYW

SEQ ID NO: 59002 - protein, 23 aa, Homo sapiens
CAKDLGYCSSTSCYVVVTGYDYW

SEQ ID NO: 59003 - protein, 20 aa, Homo sapiens
CARGYSSSWYFGGGRGFDYW

SEQ ID NO: 59004 - protein, 18 aa, Homo sapiens
CARDQSDYGDYSGTFDIW

SEQ ID NO: 59005 - protein, 11 aa, Homo sapiens
CIQGTDWPYAF

SEQ ID NO: 59006 - protein, 16 aa, Homo sapiens
CAHRSIAAAGTAFNYW

SEQ ID NO: 59007 - protein, 15 aa, Homo sapiens
CVRGPPATGFHFDYW

SEQ ID NO: 59008 - protein, 16 aa, Homo sapiens
CARGYRGSYGYRFDYW

SEQ ID NO: 59009 - protein, 20 aa, Homo sapiens
CAREPCSGGSCYSEYYFDYW

SEQ ID NO: 59010 - protein, 18 aa, Homo sapiens
CAKDGIFRAQRINYFDYW

SEQ ID NO: 59011 - protein, 20 aa, Homo sapiens
CARGILNPHWYGEYYAMDVW

SEQ ID NO: 59012 - protein, 21 aa, Homo sapiens
CAHRAYSSSWYSGPHDAFDIW

SEQ ID NO: 59013 - protein, 13 aa, Homo sapiens
CSQATQFPQTWTF

SEQ ID NO: 59014 - protein, 18 aa, Homo sapiens
CAREKVFDYGDHKAFDVW

SEQ ID NO: 59015 - protein, 27 aa, Homo sapiens
CAKRGGLLALGEKFPDKRSGSEAFDMW

SEQ ID NO: 59016 - protein, 15 aa, Homo sapiens
CARIGYGSGSPFDFW

SEQ ID NO: 59017 - protein, 16 aa, Homo sapiens
CARRGYDGSDYYPDYW

SEQ ID NO: 59018 - protein, 21 aa, Homo sapiens
CARHGPIWFGELLETLKFDYW

SEQ ID NO: 59019 - protein, 16 aa, Homo sapiens
CAKDRGAGHNGGTDYW

SEQ ID NO: 59020 - protein, 17 aa, Homo sapiens
CAKDQIGGPTVTVLDYW

SEQ ID NO: 59021 - protein, 22 aa, Homo sapiens
CAKVVGRYCSGGSCYSAAVDYW

SEQ ID NO: 59022 - protein, 18 aa, Homo sapiens
CTTPALFCSGGSCHGDYW

SEQ ID NO: 59023 - protein, 19 aa, Homo sapiens
CARFEEYYDILTGLHFDFW

SEQ ID NO: 59024 - protein, 19 aa, Homo sapiens
CARHWDDYGDYALGAFDIW

SEQ ID NO: 59025 - protein, 25 aa, Homo sapiens
CARDLARLDYDILTGYYKANYFDYW

SEQ ID NO: 59026 - protein, 24 aa, Homo sapiens
CARDAGSYYDYVWGSYRSLHFDYW

SEQ ID NO: 59027 - protein, 18 aa, Homo sapiens
CARFIYSSGWYANWFDPW

SEQ ID NO: 59028 - protein, 23 aa, Homo sapiens
CAKDFTPLWFGELAMVPDAFDIW

SEQ ID NO: 59029 - protein, 11 aa, Homo sapiens
CTTLRWQYDYW

SEQ ID NO: 59030 - protein, 21 aa, Homo sapiens
CARAFGTMVRGVISTPYFDYW

SEQ ID NO: 59031 - protein, 17 aa, Homo sapiens
CASSVVGATTTGGFDYW

SEQ ID NO: 59032 - protein, 21 aa, Homo sapiens
CARTVPTLVRGIPSINRFDPW

SEQ ID NO: 59033 - protein, 17 aa, Homo sapiens
CASFQPDYDSSGYQDYW

SEQ ID NO: 59034 - protein, 11 aa, Homo sapiens
CVGSNDSHDYW

SEQ ID NO: 59035 - protein, 22 aa, Homo sapiens
CARHKRLDTAMVLGYYYGMDVW

SEQ ID NO: 59036 - protein, 27 aa, Homo sapiens
CARDTCSSAPCQTDKNSGGYFNAMDVW

SEQ ID NO: 59037 - protein, 14 aa, Homo sapiens
CVRGRGAYGDFDPW

SEQ ID NO: 59038 - protein, 19 aa, Homo sapiens
CAKAQYYYDSSGPGCFDYW

SEQ ID NO: 59039 - protein, 21 aa, Homo sapiens
CARGEHCSATNCYPHDWFDPW

SEQ ID NO: 59040 - protein, 21 aa, Homo sapiens
CARDVGRTTSSYYYYYGMDVW

SEQ ID NO: 59041 - protein, 21 aa, Homo sapiens
CARDRLLWFGELGWPHAFDIW

SEQ ID NO: 59042 - protein, 13 aa, Homo sapiens
CMLGSHWPPVGTF

SEQ ID NO: 59043 - protein, 18 aa, Homo sapiens
CTRDVGTTAGYYYGMDVW

SEQ ID NO: 59044 - protein, 21 aa, Homo sapiens
CARRISYYFGTSGSKYYFDYW

SEQ ID NO: 59045 - protein, 18 aa, Homo sapiens
CARDPWYVSYSSSRLDYW

SEQ ID NO: 59046 - protein, 22 aa, Homo sapiens
CTTGIDAYYDILTGYLSWADYW

SEQ ID NO: 59047 - protein, 20 aa, Homo sapiens
CARAGFGKSSFVVRAIFDVW

SEQ ID NO: 59048 - protein, 17 aa, Homo sapiens
CARDILTGYQGLYFDYW

SEQ ID NO: 59049 - protein, 16 aa, Homo sapiens
CARVSHYYGRDAFDIW

SEQ ID NO: 59050 - protein, 19 aa, Homo sapiens
CARAIVEEATFVADVFEIW

SEQ ID NO: 59051 - protein, 16 aa, Homo sapiens
CARVSIIFREFWFDPW

SEQ ID NO: 59052 - protein, 16 aa, Homo sapiens
CAREGVEMATIYMDVW

SEQ ID NO: 59053 - protein, 20 aa, Homo sapiens
CAHSGLLLWFGEHLNWFDPW

SEQ ID NO: 59054 - protein, 19 aa, Homo sapiens
CARLPPYYYGSGSHPIDYW

SEQ ID NO: 59055 - protein, 16 aa, Homo sapiens
CAREVPAGTSVYFDYW

SEQ ID NO: 59056 - protein, 22 aa, Homo sapiens
CAKELTLGGSYTRQGLDAFDIW

SEQ ID NO: 59057 - protein, 24 aa, Homo sapiens
CARDPKYYYDSSGYYYRINWFDPW

SEQ ID NO: 59058 - protein, 16 aa, Homo sapiens
CAHRRPGPFTGNFDYW

SEQ ID NO: 59059 - protein, 21 aa, Homo sapiens
CAIAGVTMVRRLKINGWFDPW

SEQ ID NO: 59060 - protein, 18 aa, Homo sapiens
CAKGLVWFGDYYYGMDVW

SEQ ID NO: 59061 - protein, 20 aa, Homo sapiens
CATEASGYGGPRGGDAVDIW

SEQ ID NO: 59062 - protein, 13 aa, Homo sapiens
CIVRGSGSSIDYW

SEQ ID NO: 59063 - protein, 14 aa, Homo sapiens
CQQYGSSLYSPYSF

SEQ ID NO: 59064 - protein, 19 aa, Homo sapiens
CASLGYSGYDPSRGYFDYW

SEQ ID NO: 59065 - protein, 15 aa, Homo sapiens
CARVHWGTAMDIDYW

SEQ ID NO: 59066 - protein, 16 aa, Homo sapiens
CARGGVIWFGEVFDYW

SEQ ID NO: 59067 - protein, 19 aa, Homo sapiens
CARDYRQQVFLGPYFFDPW

SEQ ID NO: 59068 - protein, 16 aa, Homo sapiens
CARHEVRYGSDAFDIW

SEQ ID NO: 59069 - protein, 21 aa, Homo sapiens
CARDVGDCSGGSCYSDAFDIW

SEQ ID NO: 59070 - protein, 15 aa, Homo sapiens
CARGYDILTGYMDVW

SEQ ID NO: 59071 - protein, 22 aa, Homo sapiens
CASPLGSGSYSPYYYYYGMDVW

SEQ ID NO: 59072 - protein, 23 aa, Homo sapiens
CARSLSYYYDSSGYYLFDAFDIW

SEQ ID NO: 59073 - protein, 15 aa, Homo sapiens
CARAGLYTNDAFDIW

SEQ ID NO: 59074 - protein, 20 aa, Homo sapiens
CAKDPPATTVTTIDDAFDIW

SEQ ID NO: 59075 - protein, 26 aa, Homo sapiens
CARDRAVVVVAATQTQAYYYYGMDVW

SEQ ID NO: 59076 - protein, 23 aa, Homo sapiens
CAKGGFFTGRYFDWSPTGGFDYW

SEQ ID NO: 59077 - protein, 18 aa, Homo sapiens
CAKRMGVFQLLSDAFDIW

SEQ ID NO: 59078 - protein, 25 aa, Homo sapiens
CARDTSLAVLRYFDWLLIPHAFDIW

SEQ ID NO: 59079 - protein, 25 aa, Homo sapiens
CARGHWGTPSQMSQSSYYYYGMDVW

SEQ ID NO: 59080 - protein, 18 aa, Homo sapiens
CARILGFGVAGTNWFDPW

SEQ ID NO: 59081 - protein, 22 aa, Homo sapiens
CAREAPPIQLWPNPANDAFDIW

SEQ ID NO: 59082 - protein, 17 aa, Homo sapiens
CAKSLIDTVTTFTFDYW

SEQ ID NO: 59083 - protein, 22 aa, Homo sapiens
CASLRLGSSAVGVYYYYGMDVW

SEQ ID NO: 59084 - protein, 14 aa, Homo sapiens
CYSTDSNDNHMGVF

SEQ ID NO: 59085 - protein, 22 aa, Homo sapiens
CARGPDYYDSSGYYSGWYFDLW

SEQ ID NO: 59086 - protein, 23 aa, Homo sapiens
CAKGRASYYDILTGYYYYGMDVW

SEQ ID NO: 59087 - protein, 18 aa, Homo sapiens
CVREGGGSDDEEGVFDHW

SEQ ID NO: 59088 - protein, 19 aa, Homo sapiens
CARGGWDIVVVPAAPFDYW

SEQ ID NO: 59089 - protein, 19 aa, Homo sapiens
CARSLTKQWLVHVPYFDYW

SEQ ID NO: 59090 - protein, 16 aa, Homo sapiens
CARVPSRTRWAYFDSW

SEQ ID NO: 59091 - protein, 20 aa, Homo sapiens
CARELRRWLQLRAVGYFDYW

SEQ ID NO: 59092 - protein, 18 aa, Homo sapiens
CARVSHGSGSYHNYFDYW

SEQ ID NO: 59093 - protein, 13 aa, Homo sapiens
CVKDQGTWEFGYW

SEQ ID NO: 59094 - protein, 20 aa, Homo sapiens
CARVPRGWLQLQTTGAFDIW

SEQ ID NO: 59095 - protein, 20 aa, Homo sapiens
CAKVPSDTGYSSSWDWVDYW

SEQ ID NO: 59096 - protein, 24 aa, Homo sapiens
CARDMSGYDYLLTTLYYYYGMDVW

SEQ ID NO: 59097 - protein, 13 aa, Homo sapiens
CANLGISNHFDYW

SEQ ID NO: 59098 - protein, 23 aa, Homo sapiens
CARARYYYDSSGYPSPEEYFQHW

SEQ ID NO: 59099 - protein, 20 aa, Homo sapiens
CARGGCCSGWYVGYNWFDPW

SEQ ID NO: 59100 - protein, 18 aa, Homo sapiens
CAKPIGAYGDPLYAFDIW

SEQ ID NO: 59101 - protein, 23 aa, Homo sapiens
CARAQTDIVATIFFYYYYGMDVW

SEQ ID NO: 59102 - protein, 17 aa, Homo sapiens
CARFRRDGYELGPFDYW

SEQ ID NO: 59103 - protein, 23 aa, Homo sapiens
CARLLGPRTIFGVVIIRGHFDYW

SEQ ID NO: 59104 - protein, 12 aa, Homo sapiens
CAKGSQGAFDMW

SEQ ID NO: 59105 - protein, 16 aa, Homo sapiens
CAHRTVGFLYSGFDPW

SEQ ID NO: 59106 - protein, 21 aa, Homo sapiens
CARPNTAMGHYYYYYYGMDVW

SEQ ID NO: 59107 - protein, 18 aa, Homo sapiens
CARYRRLTIAVADGFDCW

SEQ ID NO: 59108 - protein, 18 aa, Homo sapiens
CAGIQSITLYYYYGMDVW

SEQ ID NO: 59109 - protein, 11 aa, Homo sapiens
CHQRNNWPDSF

SEQ ID NO: 59110 - protein, 20 aa, Homo sapiens
CAKDPPTSMTTVTTDAFDIW

SEQ ID NO: 59111 - protein, 20 aa, Homo sapiens
CAREYYDILTGYPDSVFDYW

SEQ ID NO: 59112 - protein, 18 aa, Homo sapiens
CARDRTTYWGGDCYSDYW

SEQ ID NO: 59113 - protein, 19 aa, Homo sapiens
CALIPYDILTGYYTGFDYW

SEQ ID NO: 59114 - protein, 21 aa, Homo sapiens
CAKDMLFSGYDAMADDAFDIW

SEQ ID NO: 59115 - protein, 13 aa, Homo sapiens
CARHSNWSPFDLW

SEQ ID NO: 59116 - protein, 19 aa, Homo sapiens
CAKDSSYYGSDWGGYFDFW

SEQ ID NO: 59117 - protein, 16 aa, Homo sapiens
CATGSGTGVPYWFDPW

SEQ ID NO: 59118 - protein, 17 aa, Homo sapiens
CARDVVFDWLYDPFDYW

SEQ ID NO: 59119 - protein, 16 aa, Homo sapiens
CAKECDDYFYYGMDVW

SEQ ID NO: 59120 - protein, 22 aa, Homo sapiens
CAKEVAGGLWFGELPPLPFDYW

SEQ ID NO: 59121 - protein, 16 aa, Homo sapiens
CAREPWYSSNTAEDYW

SEQ ID NO: 59122 - protein, 15 aa, Homo sapiens
CAREAGSHLSDFDYW

SEQ ID NO: 59123 - protein, 19 aa, Homo sapiens
CARDRSLYYYYDSSGADYW

SEQ ID NO: 59124 - protein, 22 aa, Homo sapiens
CARDTIASMTMPAGTNWHFDLW

SEQ ID NO: 59125 - protein, 25 aa, Homo sapiens
CARDGAISSAYSSGWYYYYYGMDVW

SEQ ID NO: 59126 - protein, 15 aa, Homo sapiens
CARTYDYVWRPFDYW

SEQ ID NO: 59127 - protein, 21 aa, Homo sapiens
CAKDGGTVWFGELLYHYPHYW

SEQ ID NO: 59128 - protein, 21 aa, Homo sapiens
CARQGEWLSWYGSGIGWFDPW

SEQ ID NO: 59129 - protein, 20 aa, Homo sapiens
CARDIAAVGSTDYYYGMDVW

SEQ ID NO: 59130 - protein, 27 aa, Homo sapiens
CARDLIVVVPAAIWAEPHYYYYGMDVW

SEQ ID NO: 59131 - protein, 15 aa, Homo sapiens
CARHGGALGTSLDYW

SEQ ID NO: 59132 - protein, 14 aa, Homo sapiens
CARRYNWNGGPDYW

SEQ ID NO: 59133 - protein, 26 aa, Homo sapiens
CAREENYDLWTGRWGGAVYYYGMDVW

SEQ ID NO: 59134 - protein, 18 aa, Homo sapiens
CARGEDSSWYAYWYFDLW

SEQ ID NO: 59135 - protein, 24 aa, Homo sapiens
CATDKVVVTAIPPYYYYYYGMDVW

SEQ ID NO: 59136 - protein, 14 aa, Homo sapiens
CATAYKALDAFDIW

SEQ ID NO: 59137 - protein, 15 aa, Homo sapiens
CATLGLPRTRSLDYW

SEQ ID NO: 59138 - protein, 17 aa, Homo sapiens
CAKPLLVVVTAFDWDYW

SEQ ID NO: 59139 - protein, 22 aa, Homo sapiens
CARDKGRYYDSSGYPNTWFDPW

SEQ ID NO: 59140 - protein, 15 aa, Homo sapiens
CARYSSSLNGWFDPW

SEQ ID NO: 59141 - protein, 17 aa, Homo sapiens
CAHRPAWFGDALWFDPW

SEQ ID NO: 59142 - protein, 20 aa, Homo sapiens
CAKDMQVAAAGRGGYYFDYW

SEQ ID NO: 59143 - protein, 18 aa, Homo sapiens
CTRPPPGYYYYYYGMDVW

SEQ ID NO: 59144 - protein, 19 aa, Homo sapiens
CARDPISERWLQSDYFDYW

SEQ ID NO: 59145 - protein, 22 aa, Homo sapiens
CARGREQRWFGELLSTYYFDYW

SEQ ID NO: 59146 - protein, 17 aa, Homo sapiens
CAKDYSFDSGSEAFDIW

SEQ ID NO: 59147 - protein, 18 aa, Homo sapiens
CAGLSVVLAATVDPFDVW

SEQ ID NO: 59148 - protein, 13 aa, Homo sapiens
CAREDSSGWFHYW

SEQ ID NO: 59149 - protein, 23 aa, Homo sapiens
CAKPAGYYDILTGYVSYWYFDLW

SEQ ID NO: 59150 - protein, 23 aa, Homo sapiens
CARESGPLWEVLGAYYYYGMDVW

SEQ ID NO: 59151 - protein, 13 aa, Homo sapiens
CAKISGYVPPDYW

SEQ ID NO: 59152 - protein, 20 aa, Homo sapiens
CARLFYSTRWYSFGNYFDYW

SEQ ID NO: 59153 - protein, 22 aa, Homo sapiens
CASGGWNRCSGGSCYSGWFDPW

SEQ ID NO: 59154 - protein, 24 aa, Homo sapiens
CARLGFDYDILTGQPSIYWYFDLW

SEQ ID NO: 59155 - protein, 19 aa, Homo sapiens
CTTGGDYFAIYYYYGMDVW

SEQ ID NO: 59156 - protein, 23 aa, Homo sapiens
CAKDLSPSQYSSSWYGWGGIDYW

SEQ ID NO: 59157 - protein, 19 aa, Homo sapiens
CASLPYSLTVASPYYFDHW

SEQ ID NO: 59158 - protein, 20 aa, Homo sapiens
CARDYSNRWRSYYYYGVDVW

SEQ ID NO: 59159 - protein, 19 aa, Homo sapiens
CARTRHDILTGYYFAFDIW

SEQ ID NO: 59160 - protein, 21 aa, Homo sapiens
CAKDHGYSSGWARSTGPFDYW

SEQ ID NO: 59161 - protein, 20 aa, Homo sapiens
CARNEFFSGYYRLQGAFDIW

SEQ ID NO: 59162 - protein, 19 aa, Homo sapiens
CARVGAPLLPYYYYGMDVW

SEQ ID NO: 59163 - protein, 29 aa, Homo sapiens
CARAARAPQIYDILTGYYSRGRGDGFDYW

SEQ ID NO: 59164 - protein, 15 aa, Homo sapiens
CAREMEYYNSGFGYW

SEQ ID NO: 59165 - protein, 25 aa, Homo sapiens
CARHVRSADSEGLRYFDWLTNFDYW

SEQ ID NO: 59166 - protein, 20 aa, Homo sapiens
CARGGYYYDSSGYYYALDYW

SEQ ID NO: 59167 - protein, 19 aa, Homo sapiens
CVKDYLVREVTRYDVFDIW

SEQ ID NO: 59168 - protein, 14 aa, Homo sapiens
CAHSGHIFASFDYW

SEQ ID NO: 59169 - protein, 14 aa, Homo sapiens
CARMYGGKSPYDYW

SEQ ID NO: 59170 - protein, 16 aa, Homo sapiens
CAHRPSVDILTGFDPW

SEQ ID NO: 59171 - protein, 14 aa, Homo sapiens
CAMCGYSLDWFDPW

SEQ ID NO: 59172 - protein, 16 aa, Homo sapiens
CAKDRGSGWEGPIDYW

SEQ ID NO: 59173 - protein, 28 aa, Homo sapiens
CARELLPNLSDIVATIWGHYYYYGMDVW

SEQ ID NO: 59174 - protein, 27 aa, Homo sapiens
CAKVPGMVVVPAARGSDYYYYYGMDVW

SEQ ID NO: 59175 - protein, 16 aa, Homo sapiens
CQQYGSSPRDPTMYTF

SEQ ID NO: 59176 - protein, 18 aa, Homo sapiens
CAKDSSSGWYRENWFDPW

SEQ ID NO: 59177 - protein, 23 aa, Homo sapiens
CASPGRGYDSSWGFYYYYGMDVW

SEQ ID NO: 59178 - protein, 21 aa, Homo sapiens
CAKTLPNDFSKGYWEHAFDLW

SEQ ID NO: 59179 - protein, 22 aa, Homo sapiens
CARASKAWIQLWGGDVDYFDYW

SEQ ID NO: 59180 - protein, 20 aa, Homo sapiens
CARDMTVAGTQIYYYGMDVW

SEQ ID NO: 59181 - protein, 22 aa, Homo sapiens
CARDPGDRYSSGWLFGGYFDYW

SEQ ID NO: 59182 - protein, 14 aa, Homo sapiens
CARRRLFYGLFDYW

SEQ ID NO: 59183 - protein, 14 aa, Homo sapiens
CARVGILTGYYAYW

SEQ ID NO: 59184 - protein, 24 aa, Homo sapiens
CAREGYCSGDTCSHHYSYYGMDVW

SEQ ID NO: 59185 - protein, 26 aa, Homo sapiens
CAKDHYSSSWYGQSPHYYYYYGMDVW

SEQ ID NO: 59186 - protein, 18 aa, Homo sapiens
CAKDPSDYSSGWSWFDPW

SEQ ID NO: 59187 - protein, 22 aa, Homo sapiens
CARGRLMYYLESSGYYYPFDSW

SEQ ID NO: 59188 - protein, 16 aa, Homo sapiens
CASSDYSDHEPYFDSW

SEQ ID NO: 59189 - protein, 23 aa, Homo sapiens
CARDLVSVRGVIWLSVVSWFDPW

SEQ ID NO: 59190 - protein, 18 aa, Homo sapiens
CAGRGYSGYDLLGWFDPW

SEQ ID NO: 59191 - protein, 15 aa, Homo sapiens
CAKLWPTDNDALDIW

SEQ ID NO: 59192 - protein, 17 aa, Homo sapiens
CARLAASGSYRGSFDIW

SEQ ID NO: 59193 - protein, 23 aa, Homo sapiens
CARVVHGPPGRLLFSYYYGMDVW

SEQ ID NO: 59194 - protein, 20 aa, Homo sapiens
CAKDRGLGSGWYIEYYFDYW

SEQ ID NO: 59195 - protein, 20 aa, Homo sapiens
CARDYCSSTSCYQSLAFDIW

SEQ ID NO: 59196 - protein, 19 aa, Homo sapiens
CAKDPYSSGWSDDWYFDLW

SEQ ID NO: 59197 - protein, 17 aa, Homo sapiens
CASKADGWLQWGQFDYW

SEQ ID NO: 59198 - protein, 13 aa, Homo sapiens
CLAWDSTTASSVF

SEQ ID NO: 59199 - protein, 19 aa, Homo sapiens
CARGMYDSSGYLTYYFDYW

SEQ ID NO: 59200 - protein, 19 aa, Homo sapiens
CARAQGSSSWYVSIWFDPW

SEQ ID NO: 59201 - protein, 15 aa, Homo sapiens
CAKVGSAGTGEIDYW

SEQ ID NO: 59202 - protein, 22 aa, Homo sapiens
CARVRDYYDSSGYYYVGDFDYW

SEQ ID NO: 59203 - protein, 18 aa, Homo sapiens
CATTGGYSYGFNWYFDLW

SEQ ID NO: 59204 - protein, 20 aa, Homo sapiens
CAKLDIVVVPAATIDAFDIW

SEQ ID NO: 59205 - protein, 16 aa, Homo sapiens
CASGADSGSSVPLDYW

SEQ ID NO: 59206 - protein, 23 aa, Homo sapiens
CARDEGYCSSTSCYSDYYGMDVW

SEQ ID NO: 59207 - protein, 18 aa, Homo sapiens
CARVTSGYSSGWEEFDYW

SEQ ID NO: 59208 - protein, 15 aa, Homo sapiens
CATLGPQGSRYFDNW

SEQ ID NO: 59209 - protein, 15 aa, Homo sapiens
CQSYGSENDRDYVVF

SEQ ID NO: 59210 - protein, 23 aa, Homo sapiens
CARGLPVGWTYYYHDYGDHLDYW

SEQ ID NO: 59211 - protein, 13 aa, Homo sapiens
CQSSDISGFRGVF

SEQ ID NO: 59212 - protein, 21 aa, Homo sapiens
CARARYSSGWYGDPYYYFDYW

SEQ ID NO: 59213 - protein, 19 aa, Homo sapiens
CARDPPFMPAARTLGRDYW

SEQ ID NO: 59214 - protein, 20 aa, Homo sapiens
CARHLRYFDWLLSLGAFDIW

SEQ ID NO: 59215 - protein, 17 aa, Homo sapiens
CARHFYTSSWYADFDSW

SEQ ID NO: 59216 - protein, 17 aa, Homo sapiens
CAKDLGPLRWELLFDYW

SEQ ID NO: 59217 - protein, 13 aa, Homo sapiens
CARTPYTFHFDYW

SEQ ID NO: 59218 - protein, 20 aa, Homo sapiens
CARPGLGVAPATINWYFDLW

SEQ ID NO: 59219 - protein, 23 aa, Homo sapiens
CARVARQWLERRTNRGPYYFDYW

SEQ ID NO: 59220 - protein, 23 aa, Homo sapiens
CARHPMVLLWFGESPGANWFDPW

SEQ ID NO: 59221 - protein, 22 aa, Homo sapiens
CAKDLNYGDYPSVYYYYGMDVW

SEQ ID NO: 59222 - protein, 16 aa, Homo sapiens
CARDQGGSGSIALDVW

SEQ ID NO: 59223 - protein, 17 aa, Homo sapiens
CARLYGDFLFLGAFDIW

SEQ ID NO: 59224 - protein, 24 aa, Homo sapiens
CARDKGIADHRTNFYYYYYGMDVW

SEQ ID NO: 59225 - protein, 18 aa, Homo sapiens
CAHSLPAGILTGYWFDPW

SEQ ID NO: 59226 - protein, 17 aa, Homo sapiens
CARPYRGYCGGDCYDYW

SEQ ID NO: 59227 - protein, 20 aa, Homo sapiens
CARRAYFYDSTGPKYYIDYW

SEQ ID NO: 59228 - protein, 18 aa, Homo sapiens
CASDRHRYSSGSGVFDYW

SEQ ID NO: 59229 - protein, 22 aa, Homo sapiens
CARDYMGLLWFGDNYYYGMDVW

SEQ ID NO: 59230 - protein, 19 aa, Homo sapiens
CEAFHFDGSGSYASEGDYW

SEQ ID NO: 59231 - protein, 14 aa, Homo sapiens
CVRDRGGDDAFDIW

SEQ ID NO: 59232 - protein, 15 aa, Homo sapiens
CAKGYSYGTGLIDYW

SEQ ID NO: 59233 - protein, 21 aa, Homo sapiens
CARDADDILTGFGGGNAFDIW

SEQ ID NO: 59234 - protein, 21 aa, Homo sapiens
CAKFGDGRYSYGYLYYGMDVW

SEQ ID NO: 59235 - protein, 14 aa, Homo sapiens
CARDRSGYGRFDYW

SEQ ID NO: 59236 - protein, 20 aa, Homo sapiens
CARQGGLLWFGELFSSFDYW

SEQ ID NO: 59237 - protein, 24 aa, Homo sapiens
CARRSESGRYFDPYYYYYYGMDVW

SEQ ID NO: 59238 - protein, 23 aa, Homo sapiens
CARQEGITMVRGVITRAEYFQHW

SEQ ID NO: 59239 - protein, 22 aa, Homo sapiens
CATDSSGWHEMRNYYYYGMDVW

SEQ ID NO: 59240 - protein, 20 aa, Homo sapiens
CASSALFNARYYYYYGMDVW

SEQ ID NO: 59241 - protein, 17 aa, Homo sapiens
CAKDIGYGGNSNYFDYW

SEQ ID NO: 59242 - protein, 17 aa, Homo sapiens
CAKDNSITLVPVAIDYW

SEQ ID NO: 59243 - protein, 29 aa, Homo sapiens
CAKDLKYYDILTGYYRPPAIYYYYGMDVW

SEQ ID NO: 59244 - protein, 11 aa, Homo sapiens
CTKYYYGMDVW

SEQ ID NO: 59245 - protein, 21 aa, Homo sapiens
CARARRRITMIVVVIDAFDIW

SEQ ID NO: 59246 - protein, 19 aa, Homo sapiens
CVRDTGFYRQVNFYYFENW

SEQ ID NO: 59247 - protein, 25 aa, Homo sapiens
CARDWDYIVATEGRGTDYYYGMDVW

SEQ ID NO: 59248 - protein, 17 aa, Homo sapiens
CARAYIVVVVAATFDYW

SEQ ID NO: 59249 - protein, 17 aa, Homo sapiens
CARHRVGFVGLGWFDPW

SEQ ID NO: 59250 - protein, 16 aa, Homo sapiens
CARDTGGAYNYCFDIW

SEQ ID NO: 59251 - protein, 18 aa, Homo sapiens
CARDGIPMVRGDPGIDYW

SEQ ID NO: 59252 - protein, 20 aa, Homo sapiens
CARVGDWYYYGSGSWWFDPW

SEQ ID NO: 59253 - protein, 13 aa, Homo sapiens
CATPLWFGEEDYW

SEQ ID NO: 59254 - protein, 18 aa, Homo sapiens
CAHPGLARIGAPNAFDIW

SEQ ID NO: 59255 - protein, 15 aa, Homo sapiens
CARPRRGYHWYFDLW

SEQ ID NO: 59256 - protein, 26 aa, Homo sapiens
CARTMWSTAINYGDYGHYYYYGMDVW

SEQ ID NO: 59257 - protein, 26 aa, Homo sapiens
CAKDSLVVVPAATGEAEYYYYGMDVW

SEQ ID NO: 59258 - protein, 23 aa, Homo sapiens
CARDLRGMGSDGSGSYAPGFDYW

SEQ ID NO: 59259 - protein, 18 aa, Homo sapiens
CAREALFEQWGIYYFDYW

SEQ ID NO: 59260 - protein, 22 aa, Homo sapiens
CARWAVLLWFGELPGGGYFDYW

SEQ ID NO: 59261 - protein, 20 aa, Homo sapiens
CARATPPVTGDSGGYYFDYW

SEQ ID NO: 59262 - protein, 17 aa, Homo sapiens
CARGKVVGYYYYGLDVW

SEQ ID NO: 59263 - protein, 23 aa, Homo sapiens
CARCNIGVVVPAAMPPTGYFDLW

SEQ ID NO: 59264 - protein, 14 aa, Homo sapiens
CTTAQRRYSTCDYW

SEQ ID NO: 59265 - protein, 21 aa, Homo sapiens
CARVPRYSSSWYDYYYGMDVW

SEQ ID NO: 59266 - protein, 21 aa, Homo sapiens
CARDSTASGVAGTIWYAFDIW

SEQ ID NO: 59267 - protein, 15 aa, Homo sapiens
CSGGSCSVAPPLDYW

SEQ ID NO: 59268 - protein, 20 aa, Homo sapiens
CARIGRSFYADYYYYDMDVW

SEQ ID NO: 59269 - protein, 25 aa, Homo sapiens
CALASRTLDYDILTGDYYTTVFDYW

SEQ ID NO: 59270 - protein, 24 aa, Homo sapiens
CARYLRYFDWLLSIGNYYYGMDVW

SEQ ID NO: 59271 - protein, 15 aa, Homo sapiens
CARSLRGHLGWFDPW

SEQ ID NO: 59272 - protein, 21 aa, Homo sapiens
CATEHIGNCNGSTCHNWLDPW

SEQ ID NO: 59273 - protein, 19 aa, Homo sapiens
CTRSIVVVVAATLEYFQHW

SEQ ID NO: 59274 - protein, 22 aa, Homo sapiens
CTPDTFHYDNVGYYSQPYFDSW

SEQ ID NO: 59275 - protein, 26 aa, Homo sapiens
CAREDGYSGYDLVGLPLYYYYGMDVW

SEQ ID NO: 59276 - protein, 19 aa, Homo sapiens
CAREIVAYSSSWPNAFDIW

SEQ ID NO: 59277 - protein, 20 aa, Homo sapiens
CARLAWDTSRGAVAGTFDYW

SEQ ID NO: 59278 - protein, 16 aa, Homo sapiens
CAKDRGGFGESYFDYW

SEQ ID NO: 59279 - protein, 15 aa, Homo sapiens
CAKDRSTQQVVIDYW

SEQ ID NO: 59280 - protein, 24 aa, Homo sapiens
CARLSGGGAYSYGQYYYYYGMDVW

SEQ ID NO: 59281 - protein, 16 aa, Homo sapiens
CASFEDGYNLDWFDPW

SEQ ID NO: 59282 - protein, 23 aa, Homo sapiens
CARDGTYGSGSYYIRVINAFDIW

SEQ ID NO: 59283 - protein, 16 aa, Homo sapiens
CARDGPSSDSNAFDIW

SEQ ID NO: 59284 - protein, 14 aa, Homo sapiens
CAKDNLGATPFDYW

SEQ ID NO: 59285 - protein, 25 aa, Homo sapiens
CTTVATVSEDYGDYVESLDLGFDYW

SEQ ID NO: 59286 - protein, 19 aa, Homo sapiens
CARENRISVDGYNGPLDYW

SEQ ID NO: 59287 - protein, 23 aa, Homo sapiens
CAKDSEFDLLRYFDWLYPLADYW

SEQ ID NO: 59288 - protein, 19 aa, Homo sapiens
CARRRIDMVRTYSSGFDFW

SEQ ID NO: 59289 - protein, 16 aa, Homo sapiens
CVREGSSGSDGYFDCW

SEQ ID NO: 59290 - protein, 13 aa, Homo sapiens
CAILQLWYAFDIW

SEQ ID NO: 59291 - protein, 21 aa, Homo sapiens
CAKDAGNALGPSVLYNWFDPW

SEQ ID NO: 59292 - protein, 15 aa, Homo sapiens
CARDDGTVTTQFDYW

SEQ ID NO: 59293 - protein, 22 aa, Homo sapiens
CARDNSSSSWYSYYYYYGMDVW

SEQ ID NO: 59294 - protein, 24 aa, Homo sapiens
CARHAGEYYYDSSGYYYFPFFDYW

SEQ ID NO: 59295 - protein, 13 aa, Homo sapiens
CARCHSGWLDDYW

SEQ ID NO: 59296 - protein, 21 aa, Homo sapiens
CARQNITMVRGDAYYYGMDVW

SEQ ID NO: 59297 - protein, 22 aa, Homo sapiens
CARAVYDSSGYYFTDKYYFDYW

SEQ ID NO: 59298 - protein, 13 aa, Homo sapiens
CTTESPDTEGDYW

SEQ ID NO: 59299 - protein, 24 aa, Homo sapiens
CASGILAYCGGDCYSGAKTQFDYW

SEQ ID NO: 59300 - protein, 18 aa, Homo sapiens
CCARNEGGYSSSWDFDYW

SEQ ID NO: 59301 - protein, 24 aa, Homo sapiens
CAKDIWQGGSGSYFFHYYYGMDVW

SEQ ID NO: 59302 - protein, 19 aa, Homo sapiens
CAKRGDRVSVPGAHYFDSW

SEQ ID NO: 59303 - protein, 21 aa, Homo sapiens
CARMNYDILTGYYSQGLFDYW

SEQ ID NO: 59304 - protein, 15 aa, Homo sapiens
CAQYGDSHHDAFDIW

SEQ ID NO: 59305 - protein, 27 aa, Homo sapiens
CAGGTGCIGGGCSPFGGGYKYYAMDVW

SEQ ID NO: 59306 - protein, 18 aa, Homo sapiens
CARQGLRGYSYGRPFDYW

SEQ ID NO: 59307 - protein, 17 aa, Homo sapiens
CAKSFTGHDRIGGFDSW

SEQ ID NO: 59308 - protein, 22 aa, Homo sapiens
CARHEYYYDSSGYPRLGWFDPW

SEQ ID NO: 59309 - protein, 22 aa, Homo sapiens
CARDGLDYDILTGYSPYYFDYW

SEQ ID NO: 59310 - protein, 16 aa, Homo sapiens
CARDFSDGYSRGYDYW

SEQ ID NO: 59311 - protein, 18 aa, Homo sapiens
CARNPYCGGDCYGSFDYW

SEQ ID NO: 59312 - protein, 30 aa, Homo sapiens
CAKDLYWYDILTGYSRETAGYYYYYGMDVW

SEQ ID NO: 59313 - protein, 20 aa, Homo sapiens
CAKDLERWTISYYYYGMDVW

SEQ ID NO: 59314 - protein, 20 aa, Homo sapiens
CARGGDFDWLLLGGTPLDYW

SEQ ID NO: 59315 - protein, 14 aa, Homo sapiens
CARAEWELRTGDYW

SEQ ID NO: 59316 - protein, 30 aa, Homo sapiens
CARSPQTGRAMVRGVIIEVGYPQPVPHDYW

SEQ ID NO: 59317 - protein, 19 aa, Homo sapiens
CARGMFDSSGWLGNYFDYW

SEQ ID NO: 59318 - protein, 20 aa, Homo sapiens
CARGVVRGVTRDIAYYYDYW

SEQ ID NO: 59319 - protein, 17 aa, Homo sapiens
CARSRGIVVVTAPLDYW

SEQ ID NO: 59320 - protein, 15 aa, Homo sapiens
CAHRGAQVVAAFDYW

SEQ ID NO: 59321 - protein, 27 aa, Homo sapiens
CARDLMGNGYCSSTSCPTYYYYGMDVW

SEQ ID NO: 59322 - protein, 21 aa, Homo sapiens
CARGQYSSGWYRPQINWFDPW

SEQ ID NO: 59323 - protein, 16 aa, Homo sapiens
CAKESLAAAGRPLDYW

SEQ ID NO: 59324 - protein, 21 aa, Homo sapiens
CAREWDYQTYFDYYYYGMDVW

SEQ ID NO: 59325 - protein, 18 aa, Homo sapiens
CAKLDDYVWGAYRYFDLW

SEQ ID NO: 59326 - protein, 18 aa, Homo sapiens
CAKRGSHGDNSDDAFDIW

SEQ ID NO: 59327 - protein, 24 aa, Homo sapiens
CARVRWELVTPNLRAYYYYGMDVW

SEQ ID NO: 59328 - protein, 17 aa, Homo sapiens
CTKGAPSSALLDYFDFW

SEQ ID NO: 59329 - protein, 22 aa, Homo sapiens
CAKDVWDPMIVVVITRGYFDYW

SEQ ID NO: 59330 - protein, 21 aa, Homo sapiens
CARHPAGSQWLPHPYNWFDPW

SEQ ID NO: 59331 - protein, 21 aa, Homo sapiens
CARGGSVVVTAIGGYNWFDPW

SEQ ID NO: 59332 - protein, 20 aa, Homo sapiens
CARDRYYYDSSGYYSRLDYW

SEQ ID NO: 59333 - protein, 23 aa, Homo sapiens
CARNTYYYDSSGYLKHENWFDPW

SEQ ID NO: 59334 - protein, 21 aa, Homo sapiens
CARGPPVDIVVVVVENWFDPW

SEQ ID NO: 59335 - protein, 18 aa, Homo sapiens
CARILPTYYGSGSYYDYW

SEQ ID NO: 59336 - protein, 18 aa, Homo sapiens
CASTLNTMIVERDAFDIW

SEQ ID NO: 59337 - protein, 21 aa, Homo sapiens
CARGSAYGDYVGGLSNWFDPW

SEQ ID NO: 59338 - protein, 22 aa, Homo sapiens
CARLRYPDLKGYDYYYYGMDVW

SEQ ID NO: 59339 - protein, 16 aa, Homo sapiens
CAKEGLGYDWGYFDYW

SEQ ID NO: 59340 - protein, 18 aa, Homo sapiens
CATPASSGYDLEYYFDYW

SEQ ID NO: 59341 - protein, 17 aa, Homo sapiens
CAHRQGIAAAGGAFDIW

SEQ ID NO: 59342 - protein, 21 aa, Homo sapiens
CAKDHAGRLGDYSLDNYFDYW

SEQ ID NO: 59343 - protein, 27 aa, Homo sapiens
CARGGAYSSSWGRETLLNTYYYGMDVW

SEQ ID NO: 59344 - protein, 20 aa, Homo sapiens
CAKDRFVVVPAAILGLCDYW

SEQ ID NO: 59345 - protein, 26 aa, Homo sapiens
CARRSPGASDRVAMIRSIIGTFFDYW

SEQ ID NO: 59346 - protein, 23 aa, Homo sapiens
CAKDLGYSSGWYTLENHDAFDIW

SEQ ID NO: 59347 - protein, 16 aa, Homo sapiens
CSGGSCYDGDNFFDYW

SEQ ID NO: 59348 - protein, 20 aa, Homo sapiens
CAKTGVVVGSFTNEYYFDYW

SEQ ID NO: 59349 - protein, 20 aa, Homo sapiens
CAKDHYDSSGYYYPDYFQHW

SEQ ID NO: 59350 - protein, 19 aa, Homo sapiens
CARRYDYGDYVQRWGFDPW

SEQ ID NO: 59351 - protein, 20 aa, Homo sapiens
CAKPHLYCSSTSCYEGFDYW

SEQ ID NO: 59352 - protein, 20 aa, Homo sapiens
CAKERLGYCSGGSCYNFDYW

SEQ ID NO: 59353 - protein, 15 aa, Homo sapiens
CTVPRGYSYGGFDYW

SEQ ID NO: 59354 - protein, 20 aa, Homo sapiens
CARDRPSRVEPYYYYGMDVW

SEQ ID NO: 59355 - protein, 18 aa, Homo sapiens
CARVMVANIYYYYGMDVW

SEQ ID NO: 59356 - protein, 23 aa, Homo sapiens
CAKAPSDLYSSSWYTGHYYFDYW

SEQ ID NO: 59357 - protein, 16 aa, Homo sapiens
CAKDLFGDFLTPFDSW

SEQ ID NO: 59358 - protein, 15 aa, Homo sapiens
CVRGTSGDYTWFDPW

SEQ ID NO: 59359 - protein, 16 aa, Homo sapiens
CARVAVGPRVYPFDLW

SEQ ID NO: 59360 - protein, 16 aa, Homo sapiens
CASSGGWLSYSYFDYW

SEQ ID NO: 59361 - protein, 16 aa, Homo sapiens
CARDPWTDPSNAFHIW

SEQ ID NO: 59362 - protein, 18 aa, Homo sapiens
CARRGLSSSWYGLHFDYW

SEQ ID NO: 59363 - protein, 22 aa, Homo sapiens
CARDLTYYDILTGYISTGFDYW

SEQ ID NO: 59364 - protein, 26 aa, Homo sapiens
CARDLSSVQLWLYPRPGYSYYGMDVW

SEQ ID NO: 59365 - protein, 20 aa, Homo sapiens
CAHSRHGHGGSSGYYLFDYW

SEQ ID NO: 59366 - protein, 19 aa, Homo sapiens
CAKDLTYDYGDYRISFDYW

SEQ ID NO: 59367 - protein, 20 aa, Homo sapiens
CARHKYYDSSGYSGGELDYW

SEQ ID NO: 59368 - protein, 23 aa, Homo sapiens
CAKGPTYYDILTGYSSYNWFDPW

SEQ ID NO: 59369 - protein, 24 aa, Homo sapiens
CARLRYYYDSSGFGPDHPYYFDYW

SEQ ID NO: 59370 - protein, 20 aa, Homo sapiens
CAKDSLMVRDHYYYYGMDVW

SEQ ID NO: 59371 - protein, 18 aa, Homo sapiens
CAKDKRPTMVRGATYDYW

SEQ ID NO: 59372 - protein, 18 aa, Homo sapiens
CARDLEDNSGTYTPFDYW

SEQ ID NO: 59373 - protein, 23 aa, Homo sapiens
CARSGWRNSFGLFDYYYYGMDVW

SEQ ID NO: 59374 - protein, 16 aa, Homo sapiens
CARMTYYYDLTYFDYW

SEQ ID NO: 59375 - protein, 24 aa, Homo sapiens
CARDNVLLWFGEFTPHENNWFDPW

SEQ ID NO: 59376 - protein, 31 aa, Homo sapiens
CARGPWAVNYDILTGYYNELNYYYYYGMDVW

SEQ ID NO: 59377 - protein, 17 aa, Homo sapiens
CAKAIYYDSSGGWVDYW

SEQ ID NO: 59378 - protein, 17 aa, Homo sapiens
CARDGVAGIWNGKLDYW

SEQ ID NO: 59379 - protein, 20 aa, Homo sapiens
CARAGYSSSWYGDHWYFDLW

SEQ ID NO: 59380 - protein, 18 aa, Homo sapiens
CATLADYDSSGKTPFDYW

SEQ ID NO: 59381 - protein, 14 aa, Homo sapiens
CVHSGDFGVSFDYW

SEQ ID NO: 59382 - protein, 18 aa, Homo sapiens
CAKVGQYYYGSGEYFQHW

SEQ ID NO: 59383 - protein, 17 aa, Homo sapiens
CARLEGVVAATPWFDPW

SEQ ID NO: 59384 - protein, 22 aa, Homo sapiens
CAKLPLYPGIYSGYDHDAFDIW

SEQ ID NO: 59385 - protein, 20 aa, Homo sapiens
CANFPLPSVTTLEPYYFDYW

SEQ ID NO: 59386 - protein, 16 aa, Homo sapiens
CGRSFFAGGRHYIDYW

SEQ ID NO: 59387 - protein, 28 aa, Homo sapiens
CARDRLSRHWSDILTGYYNEGSTYFDPW

SEQ ID NO: 59388 - protein, 12 aa, Homo sapiens
CQQHNEWPLYSF

SEQ ID NO: 59389 - protein, 16 aa, Homo sapiens
CVHAGSGSYYNDFDYW

SEQ ID NO: 59390 - protein, 17 aa, Homo sapiens
CARGLRVYTSGWYPDHW

SEQ ID NO: 59391 - protein, 21 aa, Homo sapiens
CARDKFQYSSSWHYYYGMDVW

SEQ ID NO: 59392 - protein, 14 aa, Homo sapiens
CATESPVFLRYFDW

SEQ ID NO: 59393 - protein, 20 aa, Homo sapiens
CATESKKYTGSSRKGTVDYW

SEQ ID NO: 59394 - protein, 20 aa, Homo sapiens
CARDSSPYGWLRERSPFDYW

SEQ ID NO: 59395 - protein, 17 aa, Homo sapiens
CARMKRDETGYWYFDLW

SEQ ID NO: 59396 - protein, 20 aa, Homo sapiens
CTRVHSYYDILTGYSRFDYW

SEQ ID NO: 59397 - protein, 16 aa, Homo sapiens
CARRRFYGDYGPIDYW

SEQ ID NO: 59398 - protein, 21 aa, Homo sapiens
CTTDGYSSSWYVPYYYGMDVW

SEQ ID NO: 59399 - protein, 22 aa, Homo sapiens
CARDNGYDSSGYWGGDDAFDIW

SEQ ID NO: 59400 - protein, 15 aa, Homo sapiens
CAKDIGPLTGGFDYW

SEQ ID NO: 59401 - protein, 21 aa, Homo sapiens
CARDPSYSSSWFTFYWYFDLW

SEQ ID NO: 59402 - protein, 35 aa, Homo sapiens
CARATFLRYSSGWYGGDPARPPSINYYYYYGMDVW

SEQ ID NO: 59403 - protein, 23 aa, Homo sapiens
CARVDYYDSSGYYYLEGFAFDIW

SEQ ID NO: 59404 - protein, 20 aa, Homo sapiens
CARGRLPWLALEDGNWFDPW

SEQ ID NO: 59405 - protein, 24 aa, Homo sapiens
CARSPSRIQLWLQPGYYYYGMDVW

SEQ ID NO: 59406 - protein, 15 aa, Homo sapiens
CALLSFGEFVNFDYW

SEQ ID NO: 59407 - protein, 16 aa, Homo sapiens
CARKKAVSGTTPFDFW

SEQ ID NO: 59408 - protein, 22 aa, Homo sapiens
CAKGNRYYDILTGYYTAGFDYW

SEQ ID NO: 59409 - protein, 16 aa, Homo sapiens
CARGNSGWFDDYFDPW

SEQ ID NO: 59410 - protein, 17 aa, Homo sapiens
CAKVDGSGRRGHYFDSW

SEQ ID NO: 59411 - protein, 15 aa, Homo sapiens
CVRDHSPQEGYVDGW

SEQ ID NO: 59412 - protein, 17 aa, Homo sapiens
CARIHGSYGPPLDFDYW

SEQ ID NO: 59413 - protein, 15 aa, Homo sapiens
CARREVTTDSENDYW

SEQ ID NO: 59414 - protein, 22 aa, Homo sapiens
CARGPPLLRYFDWLNNNWFDPW

SEQ ID NO: 59415 - protein, 14 aa, Homo sapiens
CNSRDSSANQYLIF

SEQ ID NO: 59416 - protein, 20 aa, Homo sapiens
CARGIEGAAAGIPEYYFDYW

SEQ ID NO: 59417 - protein, 23 aa, Homo sapiens
CARVFYKGPTFMITPDGPFFDYW

SEQ ID NO: 59418 - protein, 17 aa, Homo sapiens
CARVSVAGGVHWYFDLW

SEQ ID NO: 59419 - protein, 22 aa, Homo sapiens
CAKDSPECSGGSCYWGGYFDYW

SEQ ID NO: 59420 - protein, 22 aa, Homo sapiens
CARDIFNYYDSSDLYYYGMDVW

SEQ ID NO: 59421 - protein, 21 aa, Homo sapiens
CARDRVLRYFDWLPSYYFDYW

SEQ ID NO: 59422 - protein, 23 aa, Homo sapiens
CARDPLYYDSSEGDYYYYGMDVW

SEQ ID NO: 59423 - protein, 22 aa, Homo sapiens
CARFSTDCSGGSCYHNPHFDYW

SEQ ID NO: 59424 - protein, 24 aa, Homo sapiens
CASYGSGSYYNPLDYYYYYGMDVW

SEQ ID NO: 59425 - protein, 22 aa, Homo sapiens
CATGPKDYYDSSGYYQNWFDPW

SEQ ID NO: 59426 - protein, 15 aa, Homo sapiens
CARCHSYGPSEFDYW

SEQ ID NO: 59427 - protein, 20 aa, Homo sapiens
CAKDRLGYCSSTSCYYFDYW

SEQ ID NO: 59428 - protein, 13 aa, Homo sapiens
CAPTGLGGPIDYW

SEQ ID NO: 59429 - protein, 15 aa, Homo sapiens
CASQGYSYGPGEDYW

SEQ ID NO: 59430 - protein, 22 aa, Homo sapiens
CARGVGAAGTVLYYYYYGMDVW

SEQ ID NO: 59431 - protein, 16 aa, Homo sapiens
CARGFSQGDSNWFDPW

SEQ ID NO: 59432 - protein, 18 aa, Homo sapiens
CATETSSGWYFFNYFDYW

SEQ ID NO: 59433 - protein, 29 aa, Homo sapiens
CAKVFPQWGYDILTGYYADYYYYYGMDVW

SEQ ID NO: 59434 - protein, 24 aa, Homo sapiens
CARDLDIVVVPAAMDYYYYGMDVW

SEQ ID NO: 59435 - protein, 28 aa, Homo sapiens
CARDLGFTTRPSYSSGWYIPRPYYFDYW

SEQ ID NO: 59436 - protein, 18 aa, Homo sapiens
CARGYSDIIGHRVGFDLW

SEQ ID NO: 59437 - protein, 20 aa, Homo sapiens
CARVTPSYSGSGFPQFFDHW

SEQ ID NO: 59438 - protein, 20 aa, Homo sapiens
CARDKSGSRSPFSPQYFDLW

SEQ ID NO: 59439 - protein, 20 aa, Homo sapiens
CAREHRFLAGSYYNGWFDPW

SEQ ID NO: 59440 - protein, 27 aa, Homo sapiens
CARGPVGYDILTGYYTPPYYYYGMDVW

SEQ ID NO: 59441 - protein, 15 aa, Homo sapiens
CSLWFGDSSDAFDIW

SEQ ID NO: 59442 - protein, 17 aa, Homo sapiens
CAKDIAMSVADDAFDIW

SEQ ID NO: 59443 - protein, 14 aa, Homo sapiens
CAKPPRGWAPFDYW

SEQ ID NO: 59444 - protein, 15 aa, Homo sapiens
CHSSGYYYAPSLDYW

SEQ ID NO: 59445 - protein, 18 aa, Homo sapiens
CARDKEMAPFTPDAFDIW

SEQ ID NO: 59446 - protein, 22 aa, Homo sapiens
CARDSQVAAAGTTLYYYGMDVW

SEQ ID NO: 59447 - protein, 14 aa, Homo sapiens
CARSVSWYVSFDYW

SEQ ID NO: 59448 - protein, 19 aa, Homo sapiens
CARRSSGYYYVDYYGMDVW

SEQ ID NO: 59449 - protein, 16 aa, Homo sapiens
CARVQRQLVVLWFDPW

SEQ ID NO: 59450 - protein, 22 aa, Homo sapiens
CARQAAPIQLWLHPTAPWFDPW

SEQ ID NO: 59451 - protein, 18 aa, Homo sapiens
CARSNDILTGYSDAFDIW

SEQ ID NO: 59452 - protein, 25 aa, Homo sapiens
CARDLSLSWRIVATINSYYYGMDVW

SEQ ID NO: 59453 - protein, 14 aa, Homo sapiens
CQSADTSASHSVIF

SEQ ID NO: 59454 - protein, 17 aa, Homo sapiens
CASGYYASGSYWGFDPW

SEQ ID NO: 59455 - protein, 17 aa, Homo sapiens
CAREAVAGPRWNWFDPW

SEQ ID NO: 59456 - protein, 20 aa, Homo sapiens
CAHSDHSSGYYLASRPFDYW

SEQ ID NO: 59457 - protein, 14 aa, Homo sapiens
CARGYRPTAVFVYW

SEQ ID NO: 59458 - protein, 16 aa, Homo sapiens
CARESSTWVRVGFDYW

SEQ ID NO: 59459 - protein, 17 aa, Homo sapiens
CAKDGYSSGWSGELDYW

SEQ ID NO: 59460 - protein, 22 aa, Homo sapiens
CARGRFTLGQWLVKEVGPDDYW

SEQ ID NO: 59461 - protein, 15 aa, Homo sapiens
CARLWVGELGAFDIW

SEQ ID NO: 59462 - protein, 18 aa, Homo sapiens
CAKARSFTAMVYNPFDYW

SEQ ID NO: 59463 - protein, 18 aa, Homo sapiens
CAREYSSGWSPPGGFDPW

SEQ ID NO: 59464 - protein, 17 aa, Homo sapiens
CAKIAAVAPGYDAFDIW

SEQ ID NO: 59465 - protein, 14 aa, Homo sapiens
CARLFSASSPFDYW

SEQ ID NO: 59466 - protein, 16 aa, Homo sapiens
CAREVGGAYGESFDIW

SEQ ID NO: 59467 - protein, 17 aa, Homo sapiens
CARRYCSGGSCSLFDYW

SEQ ID NO: 59468 - protein, 18 aa, Homo sapiens
CAREITGDLFAGNAFDIW

SEQ ID NO: 59469 - protein, 16 aa, Homo sapiens
CARPLISAAGTIGDYW

SEQ ID NO: 59470 - protein, 21 aa, Homo sapiens
CTTEVGPQLWWFGEATPFDYW

SEQ ID NO: 59471 - protein, 18 aa, Homo sapiens
CTTDGGDSYGYLYYFDYW

SEQ ID NO: 59472 - protein, 18 aa, Homo sapiens
CAKDREVRGVITAIFDVW

SEQ ID NO: 59473 - protein, 18 aa, Homo sapiens
CARDVGVIAVALNYFDYW

SEQ ID NO: 59474 - protein, 18 aa, Homo sapiens
CAKVVYSYGYVFFFMDYW

SEQ ID NO: 59475 - protein, 14 aa, Homo sapiens
CVGGWYTPSTFDSW

SEQ ID NO: 59476 - protein, 16 aa, Homo sapiens
CARAAYDFPFTWFDPW

SEQ ID NO: 59477 - protein, 19 aa, Homo sapiens
CARHLMRDYGDYGGWFDPW

SEQ ID NO: 59478 - protein, 16 aa, Homo sapiens
CAHRMMLWSNNWFDPW

SEQ ID NO: 59479 - protein, 18 aa, Homo sapiens
CGRVPLGSGWYGRAFDMW

SEQ ID NO: 59480 - protein, 27 aa, Homo sapiens
CARGVPPGPFDKLWLDSVYYYYGMDVW

SEQ ID NO: 59481 - protein, 19 aa, Homo sapiens
CARLAGSYLSYYYYGMDVW

SEQ ID NO: 59482 - protein, 18 aa, Homo sapiens
CVREVLSFEELKHFFDSW

SEQ ID NO: 59483 - protein, 16 aa, Homo sapiens
CALARGYGDDNWFDPW

SEQ ID NO: 59484 - protein, 22 aa, Homo sapiens
CARGKLVSGWYHYYYYYGMDVW

SEQ ID NO: 59485 - protein, 15 aa, Homo sapiens
CARGGGLRGSTADYW

SEQ ID NO: 59486 - protein, 19 aa, Homo sapiens
CARGWHDSSGYHSTRFDYW

SEQ ID NO: 59487 - protein, 12 aa, Homo sapiens
CQQYATSPSIAF

SEQ ID NO: 59488 - protein, 26 aa, Homo sapiens
CARGFEVKWIQLWLRPYYYYYGMDVW

SEQ ID NO: 59489 - protein, 20 aa, Homo sapiens
CARDSDPLVMPTNGDAFDIW

SEQ ID NO: 59490 - protein, 22 aa, Homo sapiens
CAKGYCSSTSCYNPLYWYFDLW

SEQ ID NO: 59491 - protein, 24 aa, Homo sapiens
CARDGIAVAGTSAYYYYYYGMDVW

SEQ ID NO: 59492 - protein, 20 aa, Homo sapiens
CARAPSCSGGSCYKLYFDYW

SEQ ID NO: 59493 - protein, 17 aa, Homo sapiens
CARAAGIGHYYYGMDVW

SEQ ID NO: 59494 - protein, 24 aa, Homo sapiens
CARDQSYYYGSGSYYGRLNWFDPW

SEQ ID NO: 59495 - protein, 16 aa, Homo sapiens
CAKDWREGSSSYYDHW

SEQ ID NO: 59496 - protein, 15 aa, Homo sapiens
CARNLLPQWLDLDYW

SEQ ID NO: 59497 - protein, 15 aa, Homo sapiens
CVRDREVTGSAFDLW

SEQ ID NO: 59498 - protein, 18 aa, Homo sapiens
CAKDGERVKGSTEYFQHW

SEQ ID NO: 59499 - protein, 14 aa, Homo sapiens
CATEYSGSSFFDFW

SEQ ID NO: 59500 - protein, 15 aa, Homo sapiens
CVRGYSGYDFLFDYW

SEQ ID NO: 59501 - protein, 20 aa, Homo sapiens
CARDPPERGSGSPHDAFDIW

SEQ ID NO: 59502 - protein, 20 aa, Homo sapiens
CARCMVDSSGYFLNWYFDLW

SEQ ID NO: 59503 - protein, 26 aa, Homo sapiens
CARDPPPDGSGSYYMKVDYYYGMDVW

SEQ ID NO: 59504 - protein, 19 aa, Homo sapiens
CAKDRLAHPEIAAAGTDYW

SEQ ID NO: 59505 - protein, 18 aa, Homo sapiens
CARQAKEWIQTFNWFDPW

SEQ ID NO: 59506 - protein, 16 aa, Homo sapiens
CARGSVPGTSKYFHHW

SEQ ID NO: 59507 - protein, 19 aa, Homo sapiens
CAISDYYDSSGYYLEFDYW

SEQ ID NO: 59508 - protein, 17 aa, Homo sapiens
CARDRDYDDYVDAFDSW

SEQ ID NO: 59509 - protein, 19 aa, Homo sapiens
CAKDPHNSGYDSKGAFDIW

SEQ ID NO: 59510 - protein, 22 aa, Homo sapiens
CARDQGDRDGYNNYYYYGMDVW

SEQ ID NO: 59511 - protein, 29 aa, Homo sapiens
CARDRLRYFDWLLGGGLGRYYYYYGMDVW

SEQ ID NO: 59512 - protein, 19 aa, Homo sapiens
CARGSMYYYGSDAYYFDYW

SEQ ID NO: 59513 - protein, 25 aa, Homo sapiens
CARGGLRYFDWLFTGPPIDNWFDPW

SEQ ID NO: 59514 - protein, 22 aa, Homo sapiens
CARGLFTMVRGVILGEHAFDIW

SEQ ID NO: 59515 - protein, 14 aa, Homo sapiens
CAKDHGYRDWFDPW

SEQ ID NO: 59516 - protein, 18 aa, Homo sapiens
CARVTTVVTPVSWYFDLW

SEQ ID NO: 59517 - protein, 15 aa, Homo sapiens
CAKPDILTGYYPDYW

SEQ ID NO: 59518 - protein, 16 aa, Homo sapiens
CASWGEGSGSYYHDYW

SEQ ID NO: 59519 - protein, 21 aa, Homo sapiens
CARSRIMITFGGVIANGFDYW

SEQ ID NO: 59520 - protein, 16 aa, Homo sapiens
CASREPFGNFGGFDNW

SEQ ID NO: 59521 - protein, 13 aa, Homo sapiens
CAGGRYGSNFDFW

SEQ ID NO: 59522 - protein, 14 aa, Homo sapiens
CQSYDSSNPPNWVF

SEQ ID NO: 59523 - protein, 17 aa, Homo sapiens
CTRGRSQWELPHAFEVW

SEQ ID NO: 59524 - protein, 24 aa, Homo sapiens
CARHRLYYYDSSGYYDLRMEFDYW

SEQ ID NO: 59525 - protein, 14 aa, Homo sapiens
CAHMVGIVGAFDYW

SEQ ID NO: 59526 - protein, 16 aa, Homo sapiens
CAREFHDYGDLTNDYW

SEQ ID NO: 59527 - protein, 19 aa, Homo sapiens
CAKLRGRSWYVYYHGMDVW

SEQ ID NO: 59528 - protein, 22 aa, Homo sapiens
CARDRGGYDILTGYRGWYFDLW

SEQ ID NO: 59529 - protein, 18 aa, Homo sapiens
CARGGWVTAMVPDWFDPW

SEQ ID NO: 59530 - protein, 22 aa, Homo sapiens
CAREGRPSVWWYSSSWYYFDYW

SEQ ID NO: 59531 - protein, 19 aa, Homo sapiens
CARDPYCSRGACSDAMDVW

SEQ ID NO: 59532 - protein, 23 aa, Homo sapiens
CARGHHYYDSSGYYYDNTYFDYW

SEQ ID NO: 59533 - protein, 20 aa, Homo sapiens
CARDSRLYYYGSGSYGFDYW

SEQ ID NO: 59534 - protein, 21 aa, Homo sapiens
CARDAVDTVVIPYYYYGMDVW

SEQ ID NO: 59535 - protein, 20 aa, Homo sapiens
CAKAINYYGSGSYPYWFDPW

SEQ ID NO: 59536 - protein, 14 aa, Homo sapiens
CARDGGAAGTVDYW

SEQ ID NO: 59537 - protein, 19 aa, Homo sapiens
CARNMRQWLSLGEYYFDYW

SEQ ID NO: 59538 - protein, 23 aa, Homo sapiens
CATSYRFAFPNFDPGTPNRLDYW

SEQ ID NO: 59539 - protein, 16 aa, Homo sapiens
CAREGVVVAAPPFDYW

SEQ ID NO: 59540 - protein, 21 aa, Homo sapiens
CARGFYYRYDSGSYLSTFDFW

SEQ ID NO: 59541 - protein, 17 aa, Homo sapiens
CAADRGWLRSAHAFDVW

SEQ ID NO: 59542 - protein, 24 aa, Homo sapiens
CARHRGIVVRGVIYADPTAPLDYW

SEQ ID NO: 59543 - protein, 20 aa, Homo sapiens
CARAGRIGYCSGGSCYLGYW

SEQ ID NO: 59544 - protein, 20 aa, Homo sapiens
CAREAGRITMIVVVTPFDYW

SEQ ID NO: 59545 - protein, 19 aa, Homo sapiens
CAKDTSVGVWGSYRVFDYW

SEQ ID NO: 59546 - protein, 17 aa, Homo sapiens
CAKAMVREVLLNYFDYW

SEQ ID NO: 59547 - protein, 21 aa, Homo sapiens
CARDWGTGTTSAYYYYGMDVW

SEQ ID NO: 59548 - protein, 23 aa, Homo sapiens
CATEDYYGSGTYFNGDSNWFDPW

SEQ ID NO: 59549 - protein, 13 aa, Homo sapiens
CAHSYGYPRFDYW

SEQ ID NO: 59550 - protein, 25 aa, Homo sapiens
CAKDLGGVSAWIQPSLYYYYGMDVW

SEQ ID NO: 59551 - protein, 24 aa, Homo sapiens
CAREEVVTPESKSEYYYYYGMDVW

SEQ ID NO: 59552 - protein, 15 aa, Homo sapiens
CARSIAVAGIAFDIW

SEQ ID NO: 59553 - protein, 17 aa, Homo sapiens
CAHSGVAVAGPGIFDYW

SEQ ID NO: 59554 - protein, 25 aa, Homo sapiens
CARALRHYYGYLVGYYDSSGYNDYW

SEQ ID NO: 59555 - protein, 16 aa, Homo sapiens
CAKDIAAGGPYYFDYW

SEQ ID NO: 59556 - protein, 20 aa, Homo sapiens
CVRDPLSSVWKLGNWYFDLW

SEQ ID NO: 59557 - protein, 21 aa, Homo sapiens
CARDPKGRILSFYYYYGMDVW

SEQ ID NO: 59558 - protein, 25 aa, Homo sapiens
CARDRREYYYDSSGYPSPEVWFDPW

SEQ ID NO: 59559 - protein, 16 aa, Homo sapiens
CARENSGYDPGYFDLW

SEQ ID NO: 59560 - protein, 21 aa, Homo sapiens
CARDKYGYSYGYASDWYFDLW

SEQ ID NO: 59561 - protein, 14 aa, Homo sapiens
CQSPDSSGPSIYVF

SEQ ID NO: 59562 - protein, 18 aa, Homo sapiens
CANPCSYRGGDCYLADYW

SEQ ID NO: 59563 - protein, 18 aa, Homo sapiens
CARHKKKLWFGEFLFDYW

SEQ ID NO: 59564 - protein, 17 aa, Homo sapiens
CARENGSGSYSPNFDYW

SEQ ID NO: 59565 - protein, 19 aa, Homo sapiens
CARESIQHLVLVTTNFDYW

SEQ ID NO: 59566 - protein, 16 aa, Homo sapiens
CAGNGRLSGYDSRDYW

SEQ ID NO: 59567 - protein, 21 aa, Homo sapiens
CARDYPRGSYGYSLASYFDLW

SEQ ID NO: 59568 - protein, 18 aa, Homo sapiens
CTSNYDSSGYYSAADDYW

SEQ ID NO: 59569 - protein, 22 aa, Homo sapiens
CAKGLNVLLWFGELLFGAFDIW

SEQ ID NO: 59570 - protein, 23 aa, Homo sapiens
CARDWSGYDILTGYYAAGYFDYW

SEQ ID NO: 59571 - protein, 22 aa, Homo sapiens
CARDQLIIMLRGVVPRGAMDVW

SEQ ID NO: 59572 - protein, 17 aa, Homo sapiens
CARGGWSSSRTYYFDYW

SEQ ID NO: 59573 - protein, 19 aa, Homo sapiens
CARFKWLRYFDWQYYFDYW

SEQ ID NO: 59574 - protein, 22 aa, Homo sapiens
CARRVPVEMASNWDYYYGMDVW

SEQ ID NO: 59575 - protein, 18 aa, Homo sapiens
CAKGSYEFAGWSDSFDNW

SEQ ID NO: 59576 - protein, 13 aa, Homo sapiens
CARVLGASTFDYW

SEQ ID NO: 59577 - protein, 17 aa, Homo sapiens
CAKGGGRAYGGYYFDSW

SEQ ID NO: 59578 - protein, 16 aa, Homo sapiens
CLVRGVIITVPYFDYW

SEQ ID NO: 59579 - protein, 15 aa, Homo sapiens
CAHRSPIVANAFDIW

SEQ ID NO: 59580 - protein, 24 aa, Homo sapiens
CARELVAAAGIVFLNYYYYGMDVW

SEQ ID NO: 59581 - protein, 24 aa, Homo sapiens
CARDPGVLRYFDWLAGESYYFDYW

SEQ ID NO: 59582 - protein, 20 aa, Homo sapiens
CARDCSGGSCYERRRLFDYW

SEQ ID NO: 59583 - protein, 18 aa, Homo sapiens
CARDVGRSGWYFNWFDPW

SEQ ID NO: 59584 - protein, 20 aa, Homo sapiens
CARGRTITTSGWVLSAHDYW

SEQ ID NO: 59585 - protein, 25 aa, Homo sapiens
CARAGWRRSGYDSTFPYYYYGMDVW

SEQ ID NO: 59586 - protein, 22 aa, Homo sapiens
CARDYGGIVATISGYYYGMDVW

SEQ ID NO: 59587 - protein, 18 aa, Homo sapiens
CARISGYDYAPFSFNDYW

SEQ ID NO: 59588 - protein, 17 aa, Homo sapiens
CARGPNRGGPRNGLDSW

SEQ ID NO: 59589 - protein, 21 aa, Homo sapiens
CARHLYCLGDSCYQYYGMDVW

SEQ ID NO: 59590 - protein, 25 aa, Homo sapiens
CARGGWRRGPYDSSGYYPMGAFDIW

SEQ ID NO: 59591 - protein, 23 aa, Homo sapiens
CAAPYCSGGSCYPLYYYYGMDVW

SEQ ID NO: 59592 - protein, 17 aa, Homo sapiens
CARDVGSPDYGDYQDYW

SEQ ID NO: 59593 - protein, 19 aa, Homo sapiens
CARRITFGGVIVIRWFDPW

SEQ ID NO: 59594 - protein, 28 aa, Homo sapiens
CARVSTELGLDDYGDPNPNYYYYGMDVW

SEQ ID NO: 59595 - protein, 23 aa, Homo sapiens
CARDPTGVGYCSGGSCWPIFDYW

SEQ ID NO: 59596 - protein, 15 aa, Homo sapiens
CAKEFSSWYRAFDYW

SEQ ID NO: 59597 - protein, 22 aa, Homo sapiens
CASLVVGSGWLTTVGRDPFDYW

SEQ ID NO: 59598 - protein, 21 aa, Homo sapiens
CSDEGGQPPTATTGTDAFDIW

SEQ ID NO: 59599 - protein, 23 aa, Homo sapiens
CARHMAVAGTSFDGHYYYGMDVW

SEQ ID NO: 59600 - protein, 19 aa, Homo sapiens
CARGEGPGDDSSGYYFNYW

SEQ ID NO: 59601 - protein, 22 aa, Homo sapiens
CARQWCSGTTICYERSSFFDIW

SEQ ID NO: 59602 - protein, 18 aa, Homo sapiens
CAREGHDYYGSPPPFDYW

SEQ ID NO: 59603 - protein, 18 aa, Homo sapiens
CAKDRAWGSSGWYLFDYW

SEQ ID NO: 59604 - protein, 19 aa, Homo sapiens
CARAPFVYGSGNSKFFDSW

SEQ ID NO: 59605 - protein, 24 aa, Homo sapiens
CAKDLWAHMIVVVTRYYYYGMDVW

SEQ ID NO: 59606 - protein, 17 aa, Homo sapiens
CAKASRIQVWRWAFDTW

SEQ ID NO: 59607 - protein, 14 aa, Homo sapiens
CATRGGPRGYFQHW

SEQ ID NO: 59608 - protein, 11 aa, Homo sapiens
CQQSHSKPYIF

SEQ ID NO: 59609 - protein, 16 aa, Homo sapiens
CAKDQWGFSSSWLDYW

SEQ ID NO: 59610 - protein, 15 aa, Homo sapiens
CVHSPRDYAGWFDFW

SEQ ID NO: 59611 - protein, 24 aa, Homo sapiens
CASEWVSMGSGRSAYYYYYGMDVW

SEQ ID NO: 59612 - protein, 21 aa, Homo sapiens
CARGRYCSSTSCYGGDWFDPW

SEQ ID NO: 59613 - protein, 14 aa, Homo sapiens
CAREFAMDDHFDYW

SEQ ID NO: 59614 - protein, 17 aa, Homo sapiens
CTRGYSSSWYVSWFDPW

SEQ ID NO: 59615 - protein, 24 aa, Homo sapiens
CARESPVGYDILTGYYRNWYFDLW

SEQ ID NO: 59616 - protein, 17 aa, Homo sapiens
CASADGWQQLEGYFDYW

SEQ ID NO: 59617 - protein, 13 aa, Homo sapiens
CAREAGDGTHDYW

SEQ ID NO: 59618 - protein, 20 aa, Homo sapiens
CARGAHFYYGSGSSNPFDFW

SEQ ID NO: 59619 - protein, 22 aa, Homo sapiens
CAREGGDPMVRGTHYYYGMDVW

SEQ ID NO: 59620 - protein, 25 aa, Homo sapiens
CARAWELRYFDWSQSDYYYYGMDVW

SEQ ID NO: 59621 - protein, 19 aa, Homo sapiens
CARDCTPPQQWLVAEFDYW

SEQ ID NO: 59622 - protein, 15 aa, Homo sapiens
CARGSVDWVDAFDIW

SEQ ID NO: 59623 - protein, 12 aa, Homo sapiens
CARASYRVFDFW

SEQ ID NO: 59624 - protein, 16 aa, Homo sapiens
CATDLYGDYQVYFDYW

SEQ ID NO: 59625 - protein, 20 aa, Homo sapiens
CTTEGYYDSSGYSYHHFDYW

SEQ ID NO: 59626 - protein, 18 aa, Homo sapiens
CARVDCGGDCPHTYLDYW

SEQ ID NO: 59627 - protein, 21 aa, Homo sapiens
CARDPPLLLWFGELLGPPDYW

SEQ ID NO: 59628 - protein, 16 aa, Homo sapiens
CARAPSSDYLHPFDYW

SEQ ID NO: 59629 - protein, 19 aa, Homo sapiens
CARDGTVDTLTGYYPLDYW

SEQ ID NO: 59630 - protein, 16 aa, Homo sapiens
CARGLSVTAAEPFDHW

SEQ ID NO: 59631 - protein, 21 aa, Homo sapiens
CTRDGSEMATIYYYYYGMDVW

SEQ ID NO: 59632 - protein, 11 aa, Homo sapiens
CMQGLQSPPGF

SEQ ID NO: 59633 - protein, 19 aa, Homo sapiens
CSGGSCYSLYYYYYGMDVW

SEQ ID NO: 59634 - protein, 24 aa, Homo sapiens
CARDSLGYCSSTSCYWLSHPIDYW

SEQ ID NO: 59635 - protein, 24 aa, Homo sapiens
CARETPRDAGYDSSNYYYYGMDVW

SEQ ID NO: 59636 - protein, 19 aa, Homo sapiens
CARATFMVRGVIIFAFDYW

SEQ ID NO: 59637 - protein, 21 aa, Homo sapiens
CARDIVATTTVYYYYYGMDVW

SEQ ID NO: 59638 - protein, 16 aa, Homo sapiens
CAREGMEYSYGYFDYW

SEQ ID NO: 59639 - protein, 20 aa, Homo sapiens
CARGRAYYYSSGWRTLLDYW

SEQ ID NO: 59640 - protein, 18 aa, Homo sapiens
CARVGRYHGSGSANFDYW

SEQ ID NO: 59641 - protein, 17 aa, Homo sapiens
CARVQWFGELVEYFDYW

SEQ ID NO: 59642 - protein, 18 aa, Homo sapiens
CAKVQGSGWYGGPGYDYW

SEQ ID NO: 59643 - protein, 17 aa, Homo sapiens
CAKDSMAFGVWTYFDYW

SEQ ID NO: 59644 - protein, 16 aa, Homo sapiens
CAKDNRAAAGTMGDYW

SEQ ID NO: 59645 - protein, 17 aa, Homo sapiens
CAKDLSPAMVTRIWDYW

SEQ ID NO: 59646 - protein, 19 aa, Homo sapiens
CARDLGDTAMVPTNWFDPW

SEQ ID NO: 59647 - protein, 19 aa, Homo sapiens
CARYFLALRYFDWKPFDLW

SEQ ID NO: 59648 - protein, 16 aa, Homo sapiens
CARDPGSGVHDGFDIW

SEQ ID NO: 59649 - protein, 24 aa, Homo sapiens
CAKTSYYYDSSGYFISWVTPIDYW

SEQ ID NO: 59650 - protein, 14 aa, Homo sapiens
CARDAHGDYEFDYW

SEQ ID NO: 59651 - protein, 13 aa, Homo sapiens
CARILRCTFPDYW

SEQ ID NO: 59652 - protein, 15 aa, Homo sapiens
CQAWDSSTGGGRYVF

SEQ ID NO: 59653 - protein, 15 aa, Homo sapiens
CARDSWDLLYYFVYW

SEQ ID NO: 59654 - protein, 23 aa, Homo sapiens
CARYLYYYDSSGGSRPSYYFDYW

SEQ ID NO: 59655 - protein, 18 aa, Homo sapiens
CAKGWHSSGWPHPYFDYW

SEQ ID NO: 59656 - protein, 21 aa, Homo sapiens
CARMIGPTFHYDTSGYYSDYW

SEQ ID NO: 59657 - protein, 21 aa, Homo sapiens
CARDYVRNYYDSSGQDAFDIW

SEQ ID NO: 59658 - protein, 20 aa, Homo sapiens
CARVGHLRFGRDGYNFEDYW

SEQ ID NO: 59659 - protein, 19 aa, Homo sapiens
CAKSEWGRTHGSATYYIYW

SEQ ID NO: 59660 - protein, 22 aa, Homo sapiens
CARGRGYYYGSGSYSPNWFDPW

SEQ ID NO: 59661 - protein, 23 aa, Homo sapiens
CARQTLDTYSSGWYRDPYYFDYW

SEQ ID NO: 59662 - protein, 18 aa, Homo sapiens
CASSNGGAAAGTGWFDPW

SEQ ID NO: 59663 - protein, 13 aa, Homo sapiens
CQSAHNSGTFVIF

SEQ ID NO: 59664 - protein, 14 aa, Homo sapiens
CARVDFRGDWLDPW

SEQ ID NO: 59665 - protein, 18 aa, Homo sapiens
CATGQDPSGYYFGRLDYW

SEQ ID NO: 59666 - protein, 16 aa, Homo sapiens
CAHRHGSWYGGYFHHW

SEQ ID NO: 59667 - protein, 18 aa, Homo sapiens
CAKSIWGGDYGVRAFDIW

SEQ ID NO: 59668 - protein, 24 aa, Homo sapiens
CARGDYSSSWYAEYVGYRSYFDYW

SEQ ID NO: 59669 - protein, 17 aa, Homo sapiens
CATNLGVGTTDFYFDNW

SEQ ID NO: 59670 - protein, 16 aa, Homo sapiens
CASHYPDTNRDAFDMW

SEQ ID NO: 59671 - protein, 21 aa, Homo sapiens
CARGEYCSGGSCSVAPPLDYW

SEQ ID NO: 59672 - protein, 20 aa, Homo sapiens
CARDYYDSSAHYYGSAFDIW

SEQ ID NO: 59673 - protein, 21 aa, Homo sapiens
CAKDGHPSSIAVAGLEYFQHW

SEQ ID NO: 59674 - protein, 17 aa, Homo sapiens
CAKDNPAYGSGSEYDYW

SEQ ID NO: 59675 - protein, 21 aa, Homo sapiens
CARDGQGIAAAGTVAPFGDYW

SEQ ID NO: 59676 - protein, 21 aa, Homo sapiens
CAREDPSWGWLRFSPSYFDYW

SEQ ID NO: 59677 - protein, 22 aa, Homo sapiens
CARAGFGELSAVYYYYYGMDVW

SEQ ID NO: 59678 - protein, 20 aa, Homo sapiens
CASGQGAIWFGDLDNWFDPW

SEQ ID NO: 59679 - protein, 18 aa, Homo sapiens
CAAHLGAAANYYYGMDVW

SEQ ID NO: 59680 - protein, 16 aa, Homo sapiens
CARDFGFGGDGYKNYW

SEQ ID NO: 59681 - protein, 14 aa, Homo sapiens
CYRSGSSMDAFDIW

SEQ ID NO: 59682 - protein, 18 aa, Homo sapiens
CARDFGGEGDYYYGMDVW

SEQ ID NO: 59683 - protein, 19 aa, Homo sapiens
CAKDLWFGELLVAQSFDYW

SEQ ID NO: 59684 - protein, 15 aa, Homo sapiens
CARSVVVVGPYFNSW

SEQ ID NO: 59685 - protein, 17 aa, Homo sapiens
CAKHTGSGYGLDYFYYW

SEQ ID NO: 59686 - protein, 18 aa, Homo sapiens
CAREGIAYLGWTRAFDIW

SEQ ID NO: 59687 - protein, 16 aa, Homo sapiens
CAKAESVGIAVAFDYW

SEQ ID NO: 59688 - protein, 19 aa, Homo sapiens
CASHPGTTTSYYYYGMDVW

SEQ ID NO: 59689 - protein, 20 aa, Homo sapiens
CARWDQCIGLDCYSEAFDIW

SEQ ID NO: 59690 - protein, 16 aa, Homo sapiens
CARQVWDSYEYYFDYW

SEQ ID NO: 59691 - protein, 18 aa, Homo sapiens
CARMRYDHVWGTYFPDYW

SEQ ID NO: 59692 - protein, 14 aa, Homo sapiens
CQSTDSDGTFYWVF

SEQ ID NO: 59693 - protein, 18 aa, Homo sapiens
CARAYGYSSGWPYAFDIW

SEQ ID NO: 59694 - protein, 13 aa, Homo sapiens
CARARLLPPFDYW

SEQ ID NO: 59695 - protein, 20 aa, Homo sapiens
CARQPYHYDISGHYYYPDIW

SEQ ID NO: 59696 - protein, 19 aa, Homo sapiens
CASGYSSSYLGLEVWFDPW

SEQ ID NO: 59697 - protein, 23 aa, Homo sapiens
CARDRDEWIQLWLSTYYYGMDVW

SEQ ID NO: 59698 - protein, 27 aa, Homo sapiens
CARDSLRLAAARTDGGHLYYYYGMDVW

SEQ ID NO: 59699 - protein, 19 aa, Homo sapiens
CARDGLYCSSTSCYAWDYW

SEQ ID NO: 59700 - protein, 26 aa, Homo sapiens
CAQATNHVSGSYYRAHYYYYYGMDVW

SEQ ID NO: 59701 - protein, 19 aa, Homo sapiens
CASPKGGVTDYYYYGMDVW

SEQ ID NO: 59702 - protein, 25 aa, Homo sapiens
CASPQGSSWYLHFAPNYYYYGMDVW

SEQ ID NO: 59703 - protein, 14 aa, Homo sapiens
CARRDWDGYTSDYW

SEQ ID NO: 59704 - protein, 15 aa, Homo sapiens
CANIAVPLGLGFDPW

SEQ ID NO: 59705 - protein, 21 aa, Homo sapiens
CASLNYDILTGYPKPNWFDPW

SEQ ID NO: 59706 - protein, 28 aa, Homo sapiens
CAKELNMLQRYCSGGSCYSYYYYGMDVW

SEQ ID NO: 59707 - protein, 15 aa, Homo sapiens
CAKDLSGSDQYFASW

SEQ ID NO: 59708 - protein, 17 aa, Homo sapiens
CARTSIAAAGTPNFDYW

SEQ ID NO: 59709 - protein, 19 aa, Homo sapiens
CARAHGSGSYVVFYYFDYW

SEQ ID NO: 59710 - protein, 19 aa, Homo sapiens
CATHARGVLATTNGAFDMW

SEQ ID NO: 59711 - protein, 16 aa, Homo sapiens
CVGYGSGSYEAHFDYW

SEQ ID NO: 59712 - protein, 24 aa, Homo sapiens
CAREREVYDILTGTLYYYYGMDVW

SEQ ID NO: 59713 - protein, 18 aa, Homo sapiens
CATERNLAVAVPAVLDYW

SEQ ID NO: 59714 - protein, 21 aa, Homo sapiens
CARDQGESYSSFSYTNILDYW

SEQ ID NO: 59715 - protein, 21 aa, Homo sapiens
CTRDHTKYYDSSGFPDAFDIW

SEQ ID NO: 59716 - protein, 23 aa, Homo sapiens
CAKDHIAAAGTSPNYYYYGMDVW

SEQ ID NO: 59717 - protein, 12 aa, Homo sapiens
CARMKESQFAYW

SEQ ID NO: 59718 - protein, 15 aa, Homo sapiens
CARETITVSLYFDYW

SEQ ID NO: 59719 - protein, 16 aa, Homo sapiens
CARPYSGSYYAYLDNW

SEQ ID NO: 59720 - protein, 23 aa, Homo sapiens
CARDRLRDYYDSSGYWVDAFDIW

SEQ ID NO: 59721 - protein, 26 aa, Homo sapiens
CARVKGGSNYDILTGYYNSEYYFDYW

SEQ ID NO: 59722 - protein, 23 aa, Homo sapiens
CASLSIVGATDSHYYYYYGMDVW

SEQ ID NO: 59723 - protein, 22 aa, Homo sapiens
CARHLRFGYSGSYHDRYAFDIW

SEQ ID NO: 59724 - protein, 20 aa, Homo sapiens
CAKDRELLWFGELRTPFDYW

SEQ ID NO: 59725 - protein, 16 aa, Homo sapiens
CAHRRAMIWRGFFDYW

SEQ ID NO: 59726 - protein, 21 aa, Homo sapiens
CARGTPQVVVIIPVVGAFDIW

SEQ ID NO: 59727 - protein, 16 aa, Homo sapiens
CATFGSRTHKKEFDYW

SEQ ID NO: 59728 - protein, 25 aa, Homo sapiens
CAKSDYYDSSGYLLPTVLLNAFDIW

SEQ ID NO: 59729 - protein, 23 aa, Homo sapiens
CARDLTGGIGGFGVYYYYGMDVW

SEQ ID NO: 59730 - protein, 17 aa, Homo sapiens
CARRARCSSTSCYVDYW

SEQ ID NO: 59731 - protein, 20 aa, Homo sapiens
CASITKSSGWYLGASGFDYW

SEQ ID NO: 59732 - protein, 23 aa, Homo sapiens
CATERLGKAFCGRGSCYSWFDPW

SEQ ID NO: 59733 - protein, 21 aa, Homo sapiens
CAKGKYYYGSGSPNPYYFDYW

SEQ ID NO: 59734 - protein, 21 aa, Homo sapiens
CARLVGYYDSSGYFRYYFDYW

SEQ ID NO: 59735 - protein, 23 aa, Homo sapiens
CARAVSGSGWYPALKRWYYFDYW

SEQ ID NO: 59736 - protein, 17 aa, Homo sapiens
CAKDDDYGDYDGYFQHW

SEQ ID NO: 59737 - protein, 16 aa, Homo sapiens
CAKGATLYYYNPFDHW

SEQ ID NO: 59738 - protein, 24 aa, Homo sapiens
CAKPSPVPITMIVVVTMGEGFDYW

SEQ ID NO: 59739 - protein, 18 aa, Homo sapiens
CARYRGRATAVYWYFDLW

SEQ ID NO: 59740 - protein, 28 aa, Homo sapiens
CAKDLNYYDSSGYLSPPYYYYYYGMDVW

SEQ ID NO: 59741 - protein, 15 aa, Homo sapiens
CARDADNSDDASDVW

SEQ ID NO: 59742 - protein, 14 aa, Homo sapiens
CARVIPSGWAIDYW

SEQ ID NO: 59743 - protein, 18 aa, Homo sapiens
CARDLKVVWFGESIPDYW

SEQ ID NO: 59744 - protein, 26 aa, Homo sapiens
CARDGSGRGFGELSYGYYYYYGMDVW

SEQ ID NO: 59745 - protein, 15 aa, Homo sapiens
CARGVWYYGLELDYW

SEQ ID NO: 59746 - protein, 23 aa, Homo sapiens
CARDLLAMVRGVLYPGYNAFDIW

SEQ ID NO: 59747 - protein, 21 aa, Homo sapiens
CARRLEMLLWFGEEGNWFDPW

SEQ ID NO: 59748 - protein, 17 aa, Homo sapiens
CARQGNYGSGKDAFDIW

SEQ ID NO: 59749 - protein, 15 aa, Homo sapiens
CASVTTVTSWYFDYW

SEQ ID NO: 59750 - protein, 14 aa, Homo sapiens
CARHFQLGSPFDSW

SEQ ID NO: 59751 - protein, 16 aa, Homo sapiens
CAREVGATTENAFDIW

SEQ ID NO: 59752 - protein, 15 aa, Homo sapiens
CARDGYRATGGFDPW

SEQ ID NO: 59753 - protein, 16 aa, Homo sapiens
CAREGYYGSGSTLDYW

SEQ ID NO: 59754 - protein, 24 aa, Homo sapiens
CARHLYKPHLGVRGVYYYYGMDVW

SEQ ID NO: 59755 - protein, 16 aa, Homo sapiens
CAKVLGYWPNDAFDIW

SEQ ID NO: 59756 - protein, 22 aa, Homo sapiens
CARDVVLYDSSGYYYVGWFDPW

SEQ ID NO: 59757 - protein, 27 aa, Homo sapiens
CARGDYYGSGSYYNEMEFYYYYGMDVW

SEQ ID NO: 59758 - protein, 23 aa, Homo sapiens
CARWGAGYCSSTSCYQSSYADPW

SEQ ID NO: 59759 - protein, 26 aa, Homo sapiens
CARGSLYYDILTGYLPRTLDWYFDLW

SEQ ID NO: 59760 - protein, 22 aa, Homo sapiens
CARDGVATSRGALYYYYGMDVW

SEQ ID NO: 59761 - protein, 14 aa, Homo sapiens
CVLPPEQWGTNDYW

SEQ ID NO: 59762 - protein, 13 aa, Homo sapiens
CTTGPTVTALDYW

SEQ ID NO: 59763 - protein, 26 aa, Homo sapiens
CARADNYYDSSGYYPSYYYYYGMDVW

SEQ ID NO: 59764 - protein, 17 aa, Homo sapiens
CARRSGYNYGMGWFDPW

SEQ ID NO: 59765 - protein, 23 aa, Homo sapiens
CARAAHYYYDSSGYFVVGAFDIW

SEQ ID NO: 59766 - protein, 19 aa, Homo sapiens
CARGDIWFGELFPYYFDYW

SEQ ID NO: 59767 - protein, 19 aa, Homo sapiens
CARAPRGTGTYYPSWFDPW

SEQ ID NO: 59768 - protein, 15 aa, Homo sapiens
CARNSGWYVNYFDYW

SEQ ID NO: 59769 - protein, 26 aa, Homo sapiens
CTTESVEMATIGTLNPVSTPYNFDYW

SEQ ID NO: 59770 - protein, 22 aa, Homo sapiens
CARDPVPVDTAMVGYYYGMDVW

SEQ ID NO: 59771 - protein, 23 aa, Homo sapiens
CAKDSPQKGYCSGDCSFTSFDYW

SEQ ID NO: 59772 - protein, 16 aa, Homo sapiens
CAKDKGSGWVEIFDYW

SEQ ID NO: 59773 - protein, 15 aa, Homo sapiens
CARLGWDVVRHFDDW

SEQ ID NO: 59774 - protein, 16 aa, Homo sapiens
CANSYSSGWYGYFDLW

SEQ ID NO: 59775 - protein, 19 aa, Homo sapiens
CARDFGGYDLNYYYGMDVW

SEQ ID NO: 59776 - protein, 16 aa, Homo sapiens
CAHRLIQLWAPYFDYW

SEQ ID NO: 59777 - protein, 24 aa, Homo sapiens
CARGPYDYVWGSQEAYYYYGMDVW

SEQ ID NO: 59778 - protein, 20 aa, Homo sapiens
CARHSPTLGSGSYYNVFDYW

SEQ ID NO: 59779 - protein, 29 aa, Homo sapiens
CARDSFARGGYYDSSGYYKHYYYYGMDVW

SEQ ID NO: 59780 - protein, 19 aa, Homo sapiens
CVADYYDSSGYYSWDFDYW

SEQ ID NO: 59781 - protein, 19 aa, Homo sapiens
CARGGYYGSGSFQNSFDYW

SEQ ID NO: 59782 - protein, 23 aa, Homo sapiens
CASNPLRVVVTPSYKYYYGMDVW

SEQ ID NO: 59783 - protein, 21 aa, Homo sapiens
CARGSEAYDVNSGHYYYFDYW

SEQ ID NO: 59784 - protein, 21 aa, Homo sapiens
CARGRDGYNWDTYYYYGMDVW

SEQ ID NO: 59785 - protein, 13 aa, Homo sapiens
CAKHPAVDNFEYW

SEQ ID NO: 59786 - protein, 21 aa, Homo sapiens
CARSFVGFGFHSFYYYGMDVW

SEQ ID NO: 59787 - protein, 22 aa, Homo sapiens
CATIGWIFYDSSGYYAQSFDYW

SEQ ID NO: 59788 - protein, 24 aa, Homo sapiens
CATLSGRVQLERRWGYYYYGMDVW

SEQ ID NO: 59789 - protein, 23 aa, Homo sapiens
CARDLGPDVNVKIVAYGGTFDLW

SEQ ID NO: 59790 - protein, 24 aa, Homo sapiens
CARDRGVTTDLPGGNYYYYGMDVW

SEQ ID NO: 59791 - protein, 14 aa, Homo sapiens
CATEGDYGYAFDIW

SEQ ID NO: 59792 - protein, 19 aa, Homo sapiens
CAKDSEPWELLLEYYFDYW

SEQ ID NO: 59793 - protein, 19 aa, Homo sapiens
CAKDMIQYGGYSYGILDYW

SEQ ID NO: 59794 - protein, 16 aa, Homo sapiens
CAREGGSGGYDVFDFW

SEQ ID NO: 59795 - protein, 19 aa, Homo sapiens
CARGEYEGGSYYGNYFDYW

SEQ ID NO: 59796 - protein, 13 aa, Homo sapiens
CGIGEYSWGYDYW

SEQ ID NO: 59797 - protein, 16 aa, Homo sapiens
CARDLAVTFDWYFDLW

SEQ ID NO: 59798 - protein, 16 aa, Homo sapiens
CAKEIWSRVYNGFDPW

SEQ ID NO: 59799 - protein, 16 aa, Homo sapiens
CAREWEDYDSSGFDYW

SEQ ID NO: 59800 - protein, 19 aa, Homo sapiens
CASNRPQDSSGQLGIFDYW

SEQ ID NO: 59801 - protein, 15 aa, Homo sapiens
CAKDWSLGDYYFDYW

SEQ ID NO: 59802 - protein, 19 aa, Homo sapiens
CARGVWGSYRYGIDAFDIW

SEQ ID NO: 59803 - protein, 17 aa, Homo sapiens
CARQGYSGYDWGNFDYW

SEQ ID NO: 59804 - protein, 19 aa, Homo sapiens
CARDQGDGYNYGVGAFDIW

SEQ ID NO: 59805 - protein, 23 aa, Homo sapiens
CAREGEMAAAGGLIYYYYGMDVW

SEQ ID NO: 59806 - protein, 17 aa, Homo sapiens
CASYESIAPWPYYFDYW

SEQ ID NO: 59807 - protein, 21 aa, Homo sapiens
CAKSWSDWFPPWGPYNWFDPW

SEQ ID NO: 59808 - protein, 15 aa, Homo sapiens
CTRVDRWTVTFFDYW

SEQ ID NO: 59809 - protein, 21 aa, Homo sapiens
CTTEEITYSGYDSVTVGFDYW

SEQ ID NO: 59810 - protein, 16 aa, Homo sapiens
CARVPGDIVATSFDYW

SEQ ID NO: 59811 - protein, 20 aa, Homo sapiens
CARDWNVYCGGDCYSGFDYW

SEQ ID NO: 59812 - protein, 18 aa, Homo sapiens
CAKEEEEGNDYGDYVDYW

SEQ ID NO: 59813 - protein, 15 aa, Homo sapiens
CAREGNFGDPPFDSW

SEQ ID NO: 59814 - protein, 20 aa, Homo sapiens
CAKDFRYFDWTQHPGWFEYW

SEQ ID NO: 59815 - protein, 22 aa, Homo sapiens
CARLCKLLWFGEDPGDDYFDYW

SEQ ID NO: 59816 - protein, 21 aa, Homo sapiens
CATAGANIAVAGASAEDFQYW

SEQ ID NO: 59817 - protein, 16 aa, Homo sapiens
CAHSDYGDYEDRYDYW

SEQ ID NO: 59818 - protein, 17 aa, Homo sapiens
CARSMLTSSWSGYFDAW

SEQ ID NO: 59819 - protein, 13 aa, Homo sapiens
CAIAYSNSAFDIW

SEQ ID NO: 59820 - protein, 18 aa, Homo sapiens
CARRPLNSNWYGGPFDFW

SEQ ID NO: 59821 - protein, 24 aa, Homo sapiens
CARDQQYYDILTGYYGPGDAFDIW

SEQ ID NO: 59822 - protein, 19 aa, Homo sapiens
CARTPDYYGHRPPSYFDYW

SEQ ID NO: 59823 - protein, 18 aa, Homo sapiens
CARTPAYCGGDCYFVDYW

SEQ ID NO: 59824 - protein, 16 aa, Homo sapiens
CAKDVLGVTYTYFDYW

SEQ ID NO: 59825 - protein, 23 aa, Homo sapiens
CAKLGLPGYYYDSSGYYSTVDYW

SEQ ID NO: 59826 - protein, 14 aa, Homo sapiens
CARSPMRLNAFDMW

SEQ ID NO: 59827 - protein, 17 aa, Homo sapiens
CARGRYYGSGIPWFDYW

SEQ ID NO: 59828 - protein, 17 aa, Homo sapiens
CARDLGYSYGGRWFDPW

SEQ ID NO: 59829 - protein, 22 aa, Homo sapiens
CASAFLYDSVGSYHIGGVFDSW

SEQ ID NO: 59830 - protein, 16 aa, Homo sapiens
CASVAQWLARGRFDLW

SEQ ID NO: 59831 - protein, 18 aa, Homo sapiens
CARVRGGWSNEDDAFDIW

SEQ ID NO: 59832 - protein, 18 aa, Homo sapiens
CARLLRRGSYTNLAFDIW

SEQ ID NO: 59833 - protein, 19 aa, Homo sapiens
CARESSNYNDRSGYYLYYW

SEQ ID NO: 59834 - protein, 17 aa, Homo sapiens
CAKDAFRQLLVYYFDFW

SEQ ID NO: 59835 - protein, 15 aa, Homo sapiens
CARRNPQYYGSLDYW

SEQ ID NO: 59836 - protein, 22 aa, Homo sapiens
CARLRRNYDILTGNKEYYFDYW

SEQ ID NO: 59837 - protein, 21 aa, Homo sapiens
CAKDRPHYPSGIAAAGGFDYW

SEQ ID NO: 59838 - protein, 18 aa, Homo sapiens
CLHRREDPRVRGVMFDFW

SEQ ID NO: 59839 - protein, 18 aa, Homo sapiens
CARGPLGRDDYNFYFGYW

SEQ ID NO: 59840 - protein, 13 aa, Homo sapiens
CLSYDSSLTGFDF

SEQ ID NO: 59841 - protein, 17 aa, Homo sapiens
CAREGVYGGIWNYFDYW

SEQ ID NO: 59842 - protein, 17 aa, Homo sapiens
CAHRVAPGWTSPWFDPW

SEQ ID NO: 59843 - protein, 22 aa, Homo sapiens
CARGAPYCSSTSCYGTDHFDYW

SEQ ID NO: 59844 - protein, 18 aa, Homo sapiens
CAREFNSGIQLFDPLDYW

SEQ ID NO: 59845 - protein, 17 aa, Homo sapiens
CAKAAQSSGLLHNFDYW

SEQ ID NO: 59846 - protein, 21 aa, Homo sapiens
CAREAGLWYYYDSSGLYQDYW

SEQ ID NO: 59847 - protein, 22 aa, Homo sapiens
CARQSVTEVRGVILGDLYFDYW

SEQ ID NO: 59848 - protein, 19 aa, Homo sapiens
CAKAHQFTMIVVPDAFDIW

SEQ ID NO: 59849 - protein, 17 aa, Homo sapiens
CAHSFLGIAAAAAFDYW

SEQ ID NO: 59850 - protein, 19 aa, Homo sapiens
CAREFIAVAGISLSEFDPW

SEQ ID NO: 59851 - protein, 18 aa, Homo sapiens
CATPLWTYGSGSYEGDYW

SEQ ID NO: 59852 - protein, 18 aa, Homo sapiens
CARGLYDSSGYTGAFDIW

SEQ ID NO: 59853 - protein, 22 aa, Homo sapiens
CARELVAEWVGIVVVPAAADYW

SEQ ID NO: 59854 - protein, 22 aa, Homo sapiens
CARDRGHYDILTGLGHNWFDPW

SEQ ID NO: 59855 - protein, 14 aa, Homo sapiens
CYVYDTSLEYFQHW

SEQ ID NO: 59856 - protein, 23 aa, Homo sapiens
CARASYYYDSSGYPKLEYYFDYW

SEQ ID NO: 59857 - protein, 20 aa, Homo sapiens
CAREEIGYSSGWYPEYFQHW

SEQ ID NO: 59858 - protein, 21 aa, Homo sapiens
CARVRPNYDSSGYPAWYFDYW

SEQ ID NO: 59859 - protein, 17 aa, Homo sapiens
CAHRDPGWLVSDYFDYW

SEQ ID NO: 59860 - protein, 16 aa, Homo sapiens
CARMGYGGNYNAFDIW

SEQ ID NO: 59861 - protein, 13 aa, Homo sapiens
CARLKAKDYFDYW

SEQ ID NO: 59862 - protein, 16 aa, Homo sapiens
CAKYSGSYEFFPFDIW

SEQ ID NO: 59863 - protein, 22 aa, Homo sapiens
CAGNLYSSGWYTSYYYYGMDVW

SEQ ID NO: 59864 - protein, 20 aa, Homo sapiens
CAKTLGITVHFYYYYGMDVW

SEQ ID NO: 59865 - protein, 18 aa, Homo sapiens
CAKDNGHEGGIAYYFDYW

SEQ ID NO: 59866 - protein, 22 aa, Homo sapiens
CARAIDSSGYYYVTDHNWFDPW

SEQ ID NO: 59867 - protein, 18 aa, Homo sapiens
CATPRQTYDILTGSYDYW

SEQ ID NO: 59868 - protein, 20 aa, Homo sapiens
CARDYMVRGVIIRACHLDYW

SEQ ID NO: 59869 - protein, 14 aa, Homo sapiens
CARSAWGVKAFDMW

SEQ ID NO: 59870 - protein, 21 aa, Homo sapiens
CATTPNCDATSCYPSNWFDPW

SEQ ID NO: 59871 - protein, 16 aa, Homo sapiens
CASSLVRGAIEAFEIW

SEQ ID NO: 59872 - protein, 21 aa, Homo sapiens
CAKDISRGISYGYSRGAFDIW

SEQ ID NO: 59873 - protein, 17 aa, Homo sapiens
CATGAYYDTLSSYYVYW

SEQ ID NO: 59874 - protein, 24 aa, Homo sapiens
CARDSLVAVAGTGNYYYYYGMDVW

SEQ ID NO: 59875 - protein, 20 aa, Homo sapiens
CAHRVDSSGYYYDDYYFDYW

SEQ ID NO: 59876 - protein, 16 aa, Homo sapiens
CAHKRSGWYGPFFDYW

SEQ ID NO: 59877 - protein, 19 aa, Homo sapiens
CARVRYTMIVVVTYYFDYW

SEQ ID NO: 59878 - protein, 16 aa, Homo sapiens
CARDSIVADPPTFDYW

SEQ ID NO: 59879 - protein, 22 aa, Homo sapiens
CARDLFRDYDILTGYYNWFDPW

SEQ ID NO: 59880 - protein, 16 aa, Homo sapiens
CTTDKAYSYVEAFDIW

SEQ ID NO: 59881 - protein, 20 aa, Homo sapiens
CARDSLAVAESSYYYGMDVW

SEQ ID NO: 59882 - protein, 22 aa, Homo sapiens
CARGKRDCSNSRCSGDWHFDLW

SEQ ID NO: 59883 - protein, 20 aa, Homo sapiens
CARDPRGQKNVGGRRYFDYW

SEQ ID NO: 59884 - protein, 24 aa, Homo sapiens
CARDSGLITMVRGIINGVPWFDPW

SEQ ID NO: 59885 - protein, 20 aa, Homo sapiens
CARHEPNSSSWYPYDAFDIW

SEQ ID NO: 59886 - protein, 19 aa, Homo sapiens
CARSAAERVNYHYYGMDVW

SEQ ID NO: 59887 - protein, 15 aa, Homo sapiens
CAHRGQWLGPYFDYW

SEQ ID NO: 59888 - protein, 17 aa, Homo sapiens
CARERDTVRETYYFGYW

SEQ ID NO: 59889 - protein, 20 aa, Homo sapiens
CARDTQGSKSSNWLGGLDYW

SEQ ID NO: 59890 - protein, 18 aa, Homo sapiens
CARGPYFDMYTPLYFDLW

SEQ ID NO: 59891 - protein, 19 aa, Homo sapiens
CARELNYDSSGWVPSIDYW

SEQ ID NO: 59892 - protein, 22 aa, Homo sapiens
CARDREGVGELFSYYYYDMDVW

SEQ ID NO: 59893 - protein, 18 aa, Homo sapiens
CARGGWRTAMVLTTLDYW

SEQ ID NO: 59894 - protein, 18 aa, Homo sapiens
CASFIRIAAAAPGWFDPW

SEQ ID NO: 59895 - protein, 21 aa, Homo sapiens
CAKDALLWFGEFGQPNWFDPW

SEQ ID NO: 59896 - protein, 20 aa, Homo sapiens
CARQMATIPRNLYNDAFDIW

SEQ ID NO: 59897 - protein, 14 aa, Homo sapiens
CARVIAAAVAVDYW

SEQ ID NO: 59898 - protein, 13 aa, Homo sapiens
CTSRLRFSPFDYW

SEQ ID NO: 59899 - protein, 24 aa, Homo sapiens
CARDSRAQPPGPGFSPPSYYFDLW

SEQ ID NO: 59900 - protein, 20 aa, Homo sapiens
CARGVGAAPYYYYYYGMDVW

SEQ ID NO: 59901 - protein, 15 aa, Homo sapiens
CAREGGFKVRAFDIW

SEQ ID NO: 59902 - protein, 17 aa, Homo sapiens
CARDFGGSYFFDAFDIW

SEQ ID NO: 59903 - protein, 16 aa, Homo sapiens
CARHGSGYDGYYIDSW

SEQ ID NO: 59904 - protein, 28 aa, Homo sapiens
CARDLGSDSSSWYSLGRELYYYYGMDVW

SEQ ID NO: 59905 - protein, 22 aa, Homo sapiens
CARAPPNSIAVAHRSSYYFDYW

SEQ ID NO: 59906 - protein, 18 aa, Homo sapiens
CARHVRSGGWYGNYFDYW

SEQ ID NO: 59907 - protein, 21 aa, Homo sapiens
CTRGRGYSYGYFAFLAYFDYW

SEQ ID NO: 59908 - protein, 19 aa, Homo sapiens
CARGSYDILTGEDRGLDYW

SEQ ID NO: 59909 - protein, 36 aa, Homo sapiens
CARGEAVINGREVGTRYFEILTGKYRSEGKTYFDSW

SEQ ID NO: 59910 - protein, 22 aa, Homo sapiens
CAKDSQLAAAGTDYYYYGMDVW

SEQ ID NO: 59911 - protein, 19 aa, Homo sapiens
CATLLPYGDYVSGDWFDPW

SEQ ID NO: 59912 - protein, 20 aa, Homo sapiens
CARGDSSGYWPPRWVYFDYW

SEQ ID NO: 59913 - protein, 20 aa, Homo sapiens
CTRDTRWELLVYYYYGMDVW

SEQ ID NO: 59914 - protein, 24 aa, Homo sapiens
CARDLTKIVVVVAANDYYYGMDVW

SEQ ID NO: 59915 - protein, 21 aa, Homo sapiens
CARLGTAVTSNYYYYYGMDVW

SEQ ID NO: 59916 - protein, 17 aa, Homo sapiens
CAKDKGWLVDEYYFDYW

SEQ ID NO: 59917 - protein, 21 aa, Homo sapiens
CAKDLAPPLWFGELLGAFDIW

SEQ ID NO: 59918 - protein, 14 aa, Homo sapiens
CARGLGGYSYQDYW

SEQ ID NO: 59919 - protein, 14 aa, Homo sapiens
CAKDPSGNSGYDYW

SEQ ID NO: 59920 - protein, 22 aa, Homo sapiens
CARVGIAVAAPGVYYYYGMDVW

SEQ ID NO: 59921 - protein, 16 aa, Homo sapiens
CARISFSGSPLHFDYW

SEQ ID NO: 59922 - protein, 21 aa, Homo sapiens
CARASYYDILTGYYGWYFDLW

SEQ ID NO: 59923 - protein, 19 aa, Homo sapiens
CAREEWEVLLDYYYGMDVW

SEQ ID NO: 59924 - protein, 28 aa, Homo sapiens
CARAPFTMVRGVIITDGPLYYYYGMDVW

SEQ ID NO: 59925 - protein, 11 aa, Homo sapiens
CQHYNSYVYIF

SEQ ID NO: 59926 - protein, 24 aa, Homo sapiens
CAHAKEGGYCSGGSCYSAEYFQHW

SEQ ID NO: 59927 - protein, 20 aa, Homo sapiens
CRVADAGTNFAGTKYYFDLW

SEQ ID NO: 59928 - protein, 19 aa, Homo sapiens
CAREYREWLGQRQYYFDYW

SEQ ID NO: 59929 - protein, 18 aa, Homo sapiens
CATAKWPTTVTPDWFDPW

SEQ ID NO: 59930 - protein, 18 aa, Homo sapiens
CAHKSRIAVVGTGWFDPW

SEQ ID NO: 59931 - protein, 20 aa, Homo sapiens
CARERVWDIAAAGTGWFDPW

SEQ ID NO: 59932 - protein, 22 aa, Homo sapiens
CAREIPTVVRGVVYYYYGMDVW

SEQ ID NO: 59933 - protein, 15 aa, Homo sapiens
CASFPSRGEAFFDYW

SEQ ID NO: 59934 - protein, 24 aa, Homo sapiens
CASGYGDYALHLQNYYYYYGMDVW

SEQ ID NO: 59935 - protein, 24 aa, Homo sapiens
CARGRVPPPIITYYDILTDVFDPW

SEQ ID NO: 59936 - protein, 24 aa, Homo sapiens
CARTNTEDYNGGGERIVERWFDPW

SEQ ID NO: 59937 - protein, 23 aa, Homo sapiens
CARSRLGGPAAILLTYYYGMDVW

SEQ ID NO: 59938 - protein, 16 aa, Homo sapiens
CAQTLGGGEGDAFDIW

SEQ ID NO: 59939 - protein, 14 aa, Homo sapiens
CAHRHSYYDGMDVW

SEQ ID NO: 59940 - protein, 18 aa, Homo sapiens
CTRVYCSGGSCSGRFDSW

SEQ ID NO: 59941 - protein, 19 aa, Homo sapiens
CARGRAAMVLSTWYYFDYW

SEQ ID NO: 59942 - protein, 14 aa, Homo sapiens
CARFSAWLGAFDIW

SEQ ID NO: 59943 - protein, 19 aa, Homo sapiens
CARWGGGPDTAMEYYFDYW

SEQ ID NO: 59944 - protein, 14 aa, Homo sapiens
CVRARYSGSYFDYW

SEQ ID NO: 59945 - protein, 24 aa, Homo sapiens
CARDSAAYSSSWYYVDYYYGMDVW

SEQ ID NO: 59946 - protein, 17 aa, Homo sapiens
CTTTVPRVVVTATVDYW

SEQ ID NO: 59947 - protein, 18 aa, Homo sapiens
CAKSPGWSIAATGYFDYW

SEQ ID NO: 59948 - protein, 21 aa, Homo sapiens
CARSHYDILTGYYAGGEFDYW

SEQ ID NO: 59949 - protein, 21 aa, Homo sapiens
CAKGPDVLLWFGELSSPFDYW

SEQ ID NO: 59950 - protein, 23 aa, Homo sapiens
CARAPSIAVAGTAIYYYYGMDVW

SEQ ID NO: 59951 - protein, 19 aa, Homo sapiens
CAIVLVWRAAAGTGGFDYW

SEQ ID NO: 59952 - protein, 14 aa, Homo sapiens
CAQRFGWIRPFDYW

SEQ ID NO: 59953 - protein, 21 aa, Homo sapiens
CARELRANYGSGSYWHYFDYW

SEQ ID NO: 59954 - protein, 18 aa, Homo sapiens
CARRTPYPAGNGPAFDVW

SEQ ID NO: 59955 - protein, 23 aa, Homo sapiens
CARHWGGYCSSTSCYVGFRFDPW

SEQ ID NO: 59956 - protein, 19 aa, Homo sapiens
CARGSEVVVVPAAIYLDYW

SEQ ID NO: 59957 - protein, 20 aa, Homo sapiens
CARDQGYGGNSPGYWYFDLW

SEQ ID NO: 59958 - protein, 25 aa, Homo sapiens
CARNGPQDIVATIPHYYYYYGMDVW

SEQ ID NO: 59959 - protein, 17 aa, Homo sapiens
CAKDVRGYTYVTRIDYW

SEQ ID NO: 59960 - protein, 17 aa, Homo sapiens
CAKDLRQLDFNDAFDIW

SEQ ID NO: 59961 - protein, 17 aa, Homo sapiens
CAKTSTTTVTTFEFDYW

SEQ ID NO: 59962 - protein, 16 aa, Homo sapiens
CAKGFGGSVWQPFDYW

SEQ ID NO: 59963 - protein, 19 aa, Homo sapiens
CAREPLFWVPGAPNWFDPW

SEQ ID NO: 59964 - protein, 21 aa, Homo sapiens
CAKDSGGYYGSGSYSGGFDYW

SEQ ID NO: 59965 - protein, 16 aa, Homo sapiens
CAVDRGIAAAGTWDYW

SEQ ID NO: 59966 - protein, 14 aa, Homo sapiens
CASLRRDGYPFDYW

SEQ ID NO: 59967 - protein, 19 aa, Homo sapiens
CARLYGGVSGYDLKPPDYW

SEQ ID NO: 59968 - protein, 20 aa, Homo sapiens
CARALYYFDGSTYSYAFDLW

SEQ ID NO: 59969 - protein, 23 aa, Homo sapiens
CARDRLVRHPRINYYYYYGMDVW

SEQ ID NO: 59970 - protein, 19 aa, Homo sapiens
CARDFVWFGELFSHAFDIW

SEQ ID NO: 59971 - protein, 27 aa, Homo sapiens
CARDLDYYDSSGYYAPQPYYYYGMDVW

SEQ ID NO: 59972 - protein, 22 aa, Homo sapiens
CAHRLPDTMVRGVIIGEGFDYW

SEQ ID NO: 59973 - protein, 16 aa, Homo sapiens
CVREGGRDDYSHPDYW

SEQ ID NO: 59974 - protein, 24 aa, Homo sapiens
CARGSAVATLGGLYYYYYYGMDVW

SEQ ID NO: 59975 - protein, 22 aa, Homo sapiens
CARLRQNPNKHIVVVTAILDYW

SEQ ID NO: 59976 - protein, 21 aa, Homo sapiens
CARGRVVTTFYFWGVPEWDYW

SEQ ID NO: 59977 - protein, 21 aa, Homo sapiens
CAKCLGLYLLSHYYYYGMDVW

SEQ ID NO: 59978 - protein, 20 aa, Homo sapiens
CARDNWNDVSSYYYYGMDVW

SEQ ID NO: 59979 - protein, 17 aa, Homo sapiens
CAKGPAILLWFGGLDYW

SEQ ID NO: 59980 - protein, 24 aa, Homo sapiens
CARGELLWFGELLYRWRSGAFDIW

SEQ ID NO: 59981 - protein, 19 aa, Homo sapiens
CARTHYDILTGYSLELDYW

SEQ ID NO: 59982 - protein, 21 aa, Homo sapiens
CAKDPDHYYGSGSYYAAFDYW

SEQ ID NO: 59983 - protein, 12 aa, Homo sapiens
CQTADSNGIVEF

SEQ ID NO: 59984 - protein, 26 aa, Homo sapiens
CAGPISDIVVVPAAPGWNYYYGMDVW

SEQ ID NO: 59985 - protein, 21 aa, Homo sapiens
CAKLPITYYDSSGYPDAFDIW

SEQ ID NO: 59986 - protein, 23 aa, Homo sapiens
CTRSGGTTVTTPHTYYYYGMDVW

SEQ ID NO: 59987 - protein, 16 aa, Homo sapiens
CARKRLIEMGGALDVW

SEQ ID NO: 59988 - protein, 22 aa, Homo sapiens
CAREPVLRYFDWINYYYGMDVW

SEQ ID NO: 59989 - protein, 20 aa, Homo sapiens
CARLTIPFGYRGRGYYFDYW

SEQ ID NO: 59990 - protein, 21 aa, Homo sapiens
CAKGDAVDCNSGSCSGASDIW

SEQ ID NO: 59991 - protein, 24 aa, Homo sapiens
CAREEVLRYFDWSTITPRAYFQHW

SEQ ID NO: 59992 - protein, 22 aa, Homo sapiens
CARGLQSVKYSSGYYLYGMDVW

SEQ ID NO: 59993 - protein, 15 aa, Homo sapiens
CARSDQGEKGGYDYW

SEQ ID NO: 59994 - protein, 21 aa, Homo sapiens
CARGVQLERRGYYYYYGMDVW

SEQ ID NO: 59995 - protein, 22 aa, Homo sapiens
CARQGRYYDILTGYYFGGNDYW

SEQ ID NO: 59996 - protein, 17 aa, Homo sapiens
CAKGSDYYGSGTHGDYW

SEQ ID NO: 59997 - protein, 16 aa, Homo sapiens
CAKLGEVYGDYSQDYW

SEQ ID NO: 59998 - protein, 16 aa, Homo sapiens
CAKRFEWELLLDFDYW

SEQ ID NO: 59999 - protein, 22 aa, Homo sapiens
CARDRTTYDSSGYDSGWYFDLW

SEQ ID NO: 60000 - protein, 24 aa, Homo sapiens
CARAHRPYYDILTGYYRGNWFDPW

SEQ ID NO: 60001 - protein, 23 aa, Homo sapiens
CAKGGFFLLTGYYPEFDLGPDYW

SEQ ID NO: 60002 - protein, 19 aa, Homo sapiens
CARLPVVVPAANDDGFDYW

SEQ ID NO: 60003 - protein, 19 aa, Homo sapiens
CMLSAVAPGAARFYAMDVW

SEQ ID NO: 60004 - protein, 24 aa, Homo sapiens
CARDLRANMIVVVIRRLGWYFDLW

SEQ ID NO: 60005 - protein, 16 aa, Homo sapiens
CARKYSSGPGDPFDYW

SEQ ID NO: 60006 - protein, 24 aa, Homo sapiens
CAKDGYCSGGSCQELYYYYGMDVW

SEQ ID NO: 60007 - protein, 21 aa, Homo sapiens
CARGWLTHDADYYYYYGMDVW

SEQ ID NO: 60008 - protein, 21 aa, Homo sapiens
CARHRFQYSGTYYYYYGMDVW

SEQ ID NO: 60009 - protein, 22 aa, Homo sapiens
CARGNHYGDYWVGYYYYGMDVW

SEQ ID NO: 60010 - protein, 16 aa, Homo sapiens
CASRTNFDWLSTLDYW

SEQ ID NO: 60011 - protein, 23 aa, Homo sapiens
CARIIYAHSSSWFERGSDAFDIW

SEQ ID NO: 60012 - protein, 14 aa, Homo sapiens
CARASPFGTRFDYW

SEQ ID NO: 60013 - protein, 19 aa, Homo sapiens
CAKDTVGGLWMALRSFDYW

SEQ ID NO: 60014 - protein, 19 aa, Homo sapiens
CAKEMGSGDNSVGDAFDIW

SEQ ID NO: 60015 - protein, 19 aa, Homo sapiens
CAHMGYDILTGPSRYFDYW

SEQ ID NO: 60016 - protein, 16 aa, Homo sapiens
CVRDQKQQRYYAMDVW

SEQ ID NO: 60017 - protein, 18 aa, Homo sapiens
CAKVPRIAAAGDEYFHHW

SEQ ID NO: 60018 - protein, 24 aa, Homo sapiens
CAKGPWTYDYVWGSYRTPVPFDYW

SEQ ID NO: 60019 - protein, 24 aa, Homo sapiens
CARADLGSGSYYNVDGRWNAFDIW

SEQ ID NO: 60020 - protein, 19 aa, Homo sapiens
CARLADRNTWYSDWYFDLW

SEQ ID NO: 60021 - protein, 18 aa, Homo sapiens
CARADHYGSGREGWFDPW

SEQ ID NO: 60022 - protein, 23 aa, Homo sapiens
CAREVAGGSCSKERSLCNWFDPW

SEQ ID NO: 60023 - protein, 16 aa, Homo sapiens
CAREGSDGYSGHLDYW

SEQ ID NO: 60024 - protein, 22 aa, Homo sapiens
CARDARFRYYYGSGSFNWFDPW

SEQ ID NO: 60025 - protein, 17 aa, Homo sapiens
CAKGLPPTTPSDYFDYW

SEQ ID NO: 60026 - protein, 19 aa, Homo sapiens
CAKDSGQQQLVIVDWFDPW

SEQ ID NO: 60027 - protein, 16 aa, Homo sapiens
CAREVIASNQDAFDIW

SEQ ID NO: 60028 - protein, 26 aa, Homo sapiens
CARDPPFYYYDSSGYYSSYYYGMDVW

SEQ ID NO: 60029 - protein, 16 aa, Homo sapiens
CARHHYGSGSYAPDYW

SEQ ID NO: 60030 - protein, 16 aa, Homo sapiens
CANEVGQWLVTWFDPW

SEQ ID NO: 60031 - protein, 22 aa, Homo sapiens
CATMGVEMATMGSYYYYGMDVW

SEQ ID NO: 60032 - protein, 17 aa, Homo sapiens
CAKDRYPIAVAGVLDYW

SEQ ID NO: 60033 - protein, 22 aa, Homo sapiens
CAREGSWGSYYYGSANHWFDPW

SEQ ID NO: 60034 - protein, 19 aa, Homo sapiens
CARGEFIAGIHGGYYFDVW

SEQ ID NO: 60035 - protein, 15 aa, Homo sapiens
CAQGYGRTGGQFDFW

SEQ ID NO: 60036 - protein, 20 aa, Homo sapiens
CAKDFQLPYHHYYYYGMDVW

SEQ ID NO: 60037 - protein, 22 aa, Homo sapiens
CARSLHYYDRSGYPRIDAFDIW

SEQ ID NO: 60038 - protein, 19 aa, Homo sapiens
CAKDLGAYVDTAPYWFDPW

SEQ ID NO: 60039 - protein, 37 aa, Homo sapiens
CLRAEDTAVYYCARGGGYCSGGSCYDNYYYYYGMDVW

SEQ ID NO: 60040 - protein, 16 aa, Homo sapiens
CTRGPYYPTGLSPDYW

SEQ ID NO: 60041 - protein, 21 aa, Homo sapiens
CAKVTAYYDYVWGSYGPFDYW

SEQ ID NO: 60042 - protein, 16 aa, Homo sapiens
CARSPSSDGMGWADYW

SEQ ID NO: 60043 - protein, 22 aa, Homo sapiens
CARQLTMIVVVITTRPGYFDYW

SEQ ID NO: 60044 - protein, 14 aa, Homo sapiens
CARYLFDGAAFDYW

SEQ ID NO: 60045 - protein, 15 aa, Homo sapiens
CARMNGAAAGELDYW

SEQ ID NO: 60046 - protein, 16 aa, Homo sapiens
CASFSGGWEPNYIDYW

SEQ ID NO: 60047 - protein, 18 aa, Homo sapiens
CAREEKQWLVPVTSFDYW

SEQ ID NO: 60048 - protein, 22 aa, Homo sapiens
CASYSGYDHDGYYYYYYGMDVW

SEQ ID NO: 60049 - protein, 24 aa, Homo sapiens
CARGELRYFDWLFRSDYYYGMDVW

SEQ ID NO: 60050 - protein, 13 aa, Homo sapiens
CASFVEGYYFDYW

SEQ ID NO: 60051 - protein, 19 aa, Homo sapiens
CAKDFRALAAAGTFYFDYW

SEQ ID NO: 60052 - protein, 21 aa, Homo sapiens
CARAKTIWFGELMRPDAFDIW

SEQ ID NO: 60053 - protein, 24 aa, Homo sapiens
CAREAGLTNKRRDGYNYGLHFDYW

SEQ ID NO: 60054 - protein, 18 aa, Homo sapiens
CVKDIGADGLGDWYFDFW

SEQ ID NO: 60055 - protein, 18 aa, Homo sapiens
CARDAHASGYDNNWFDPW

SEQ ID NO: 60056 - protein, 23 aa, Homo sapiens
CARDGIAAAGTGDRVYYYGMDVW

SEQ ID NO: 60057 - protein, 24 aa, Homo sapiens
CVRDQDPLDFYDTPATIQGYFDYW

SEQ ID NO: 60058 - protein, 15 aa, Homo sapiens
CARLYGDPIGGFDIW

SEQ ID NO: 60059 - protein, 22 aa, Homo sapiens
CARGSWGYYDSSGYDHTPFDYW

SEQ ID NO: 60060 - protein, 36 aa, Homo sapiens
CLRAEDTATYYCAKQPVGITMVLVALFRDQWYFDHW

SEQ ID NO: 60061 - protein, 21 aa, Homo sapiens
CAHGRAYCSTTRCYSMYFDSW

SEQ ID NO: 60062 - protein, 21 aa, Homo sapiens
CARSPGHSSSWYVGYNWFDPW

SEQ ID NO: 60063 - protein, 21 aa, Homo sapiens
CATTYYYGSGSYPRYYGMDVW

SEQ ID NO: 60064 - protein, 18 aa, Homo sapiens
CARISPCGGDCYYYFDYW

SEQ ID NO: 60065 - protein, 25 aa, Homo sapiens
CAREITYYYDSSGYYCPRCGAFDIW

SEQ ID NO: 60066 - protein, 21 aa, Homo sapiens
CAREAVYDILTGYYHGNFDYW

SEQ ID NO: 60067 - protein, 20 aa, Homo sapiens
CAKDRSLDTAMVTVLYFDYW

SEQ ID NO: 60068 - protein, 18 aa, Homo sapiens
CARDAAGYYFLPAYFDYW

SEQ ID NO: 60069 - protein, 21 aa, Homo sapiens
CAKGVLDVWFGELWGGPFDYW

SEQ ID NO: 60070 - protein, 15 aa, Homo sapiens
CAKGGFFRFEAFDIW

SEQ ID NO: 60071 - protein, 13 aa, Homo sapiens
CAGGINSAYFDFW

SEQ ID NO: 60072 - protein, 22 aa, Homo sapiens
CAKDQGGWPTFIRGAIDWFDPW

SEQ ID NO: 60073 - protein, 18 aa, Homo sapiens
CAAGEDRTYNYYYGMDVW

SEQ ID NO: 60074 - protein, 23 aa, Homo sapiens
CARARADITMIFVGYHHDAFDIW

SEQ ID NO: 60075 - protein, 14 aa, Homo sapiens
CARSTLSVDNFDFW

SEQ ID NO: 60076 - protein, 20 aa, Homo sapiens
CAKDFLNWNDGLYYYGMDVW

SEQ ID NO: 60077 - protein, 23 aa, Homo sapiens
CAGAFPQYSSGWYFQGFGAFDIW

SEQ ID NO: 60078 - protein, 22 aa, Homo sapiens
CARAKVLGYSSSWYEDNWFDPW

SEQ ID NO: 60079 - protein, 21 aa, Homo sapiens
CAKVSSSGWLTTQKRAPFDYW

SEQ ID NO: 60080 - protein, 12 aa, Homo sapiens
CARSHWETFDYW

SEQ ID NO: 60081 - protein, 19 aa, Homo sapiens
CAKGRLSHYSYNWNPFDSW

SEQ ID NO: 60082 - protein, 27 aa, Homo sapiens
CATGLPITMVRGVSDPYYYYYYGMDVW

SEQ ID NO: 60083 - protein, 17 aa, Homo sapiens
CAKDADLFGQFHHLDYW

SEQ ID NO: 60084 - protein, 16 aa, Homo sapiens
CAKDIMSTMGPGFDYW

SEQ ID NO: 60085 - protein, 21 aa, Homo sapiens
CARTLTSPWEVAAADPLFDYW

SEQ ID NO: 60086 - protein, 20 aa, Homo sapiens
CARHVRDGLGWLHDAYFDYW

SEQ ID NO: 60087 - protein, 21 aa, Homo sapiens
CAKDQSWFGEYTFKGDAFDIW

SEQ ID NO: 60088 - protein, 21 aa, Homo sapiens
CARVAPNWNDVVVVDDAFDIW

SEQ ID NO: 60089 - protein, 18 aa, Homo sapiens
CAKQIWGYGSGSSHFDYW

SEQ ID NO: 60090 - protein, 20 aa, Homo sapiens
CARPGIHGYDSDYYYGMDVW

SEQ ID NO: 60091 - protein, 23 aa, Homo sapiens
CARDRGVYDRSIYYYRGGGFDFW

SEQ ID NO: 60092 - protein, 23 aa, Homo sapiens
CAREGDYYDSSGYYLPLGAFDIW

SEQ ID NO: 60093 - protein, 14 aa, Homo sapiens
CAHFNLQRPGFDYW

SEQ ID NO: 60094 - protein, 19 aa, Homo sapiens
CARAARWEQWLDPYYFDYW

SEQ ID NO: 60095 - protein, 16 aa, Homo sapiens
CAKVRVGASTEAFDIW

SEQ ID NO: 60096 - protein, 15 aa, Homo sapiens
CASPPLSGWFQFDYW

SEQ ID NO: 60097 - protein, 23 aa, Homo sapiens
CARALWGIRGLGGDYYYYGMDVW

SEQ ID NO: 60098 - protein, 13 aa, Homo sapiens
CARITPTLAFDYW

SEQ ID NO: 60099 - protein, 17 aa, Homo sapiens
CARDRFRLYGDYVVDYW

SEQ ID NO: 60100 - protein, 15 aa, Homo sapiens
CAREGIGASDGMDVW

SEQ ID NO: 60101 - protein, 18 aa, Homo sapiens
CALGGFCSGGSCSVFDNW

SEQ ID NO: 60102 - protein, 20 aa, Homo sapiens
CAREGGHRWELAFNDAFDIW

SEQ ID NO: 60103 - protein, 23 aa, Homo sapiens
CAHSAYYDSSGYYPIRVSWFDPW

SEQ ID NO: 60104 - protein, 22 aa, Homo sapiens
CARFIVVVPATLIRPPYYFDYW

SEQ ID NO: 60105 - protein, 25 aa, Homo sapiens
CARYSYYYDSSGRANYYYYYGMDVW

SEQ ID NO: 60106 - protein, 21 aa, Homo sapiens
CARDPAVNYYDSSGFPIFDYW

SEQ ID NO: 60107 - protein, 18 aa, Homo sapiens
CAKAGTLYSSSWYKADYW

SEQ ID NO: 60108 - protein, 19 aa, Homo sapiens
CARDGQPLMVRGVDWFDPW

SEQ ID NO: 60109 - protein, 19 aa, Homo sapiens
CAKDPNLYSSSWYWYFDYW

SEQ ID NO: 60110 - protein, 23 aa, Homo sapiens
CARPPGGYDILTGYYSAYYFDYW

SEQ ID NO: 60111 - protein, 20 aa, Homo sapiens
CARDGVVNSGNDPPNHFESW

SEQ ID NO: 60112 - protein, 14 aa, Homo sapiens
CAHIKARSGWFDPW

SEQ ID NO: 60113 - protein, 21 aa, Homo sapiens
CARELTYYDTLTGYNWYFDLW

SEQ ID NO: 60114 - protein, 16 aa, Homo sapiens
CVKDRFPGGSLYFDYW

SEQ ID NO: 60115 - protein, 19 aa, Homo sapiens
CAKDHPVDRVAAIDWFDPW

SEQ ID NO: 60116 - protein, 20 aa, Homo sapiens
CAARTLGYDYLLTEKYFDYW

SEQ ID NO: 60117 - protein, 21 aa, Homo sapiens
CVRDGGYCIGGNCDYNWFDPW

SEQ ID NO: 60118 - protein, 16 aa, Homo sapiens
CAKDERITMIGPWDYW

SEQ ID NO: 60119 - protein, 15 aa, Homo sapiens
CTTDGSEYGDLFDYW

SEQ ID NO: 60120 - protein, 20 aa, Homo sapiens
CAHSFYDILTGHENDAFDIW

SEQ ID NO: 60121 - protein, 21 aa, Homo sapiens
CAKAPSPGDLPLDPPGGFDYW

SEQ ID NO: 60122 - protein, 17 aa, Homo sapiens
CAKAWQWLVLTTPFDYW

SEQ ID NO: 60123 - protein, 20 aa, Homo sapiens
CTTNRAYDYVWGSYRYVDYW

SEQ ID NO: 60124 - protein, 20 aa, Homo sapiens
CATGWGDYGDYGDAYYFDYW

SEQ ID NO: 60125 - protein, 16 aa, Homo sapiens
CSTTSVMTTVTYFDYW

SEQ ID NO: 60126 - protein, 24 aa, Homo sapiens
CTTDAKYCSGGSCPLGYYYGMDVW

SEQ ID NO: 60127 - protein, 29 aa, Homo sapiens
CARAPAIYYYGSGSYYNPLGYYYYGMDVW

SEQ ID NO: 60128 - protein, 19 aa, Homo sapiens
CARPQGSSWYDPTYYFDYW

SEQ ID NO: 60129 - protein, 20 aa, Homo sapiens
CARLGEPYYYDSSGYFFDYW

SEQ ID NO: 60130 - protein, 16 aa, Homo sapiens
CARGRSSSWDDYFDYW

SEQ ID NO: 60131 - protein, 21 aa, Homo sapiens
CARRMGSSGWYVQGARPFDYW

SEQ ID NO: 60132 - protein, 14 aa, Homo sapiens
CAREIAVAATIDYW

SEQ ID NO: 60133 - protein, 28 aa, Homo sapiens
CARDWDYYDSSGYSPTRSYYYYYGMDVW

SEQ ID NO: 60134 - protein, 18 aa, Homo sapiens
CTRRTFYSGTNGFRSDYW

SEQ ID NO: 60135 - protein, 18 aa, Homo sapiens
CAREFQYYYDSSGLLDYW

SEQ ID NO: 60136 - protein, 17 aa, Homo sapiens
CTHRRTAVAGSNWFDPW

SEQ ID NO: 60137 - protein, 19 aa, Homo sapiens
CARHSFPRWLQANWYFDLW

SEQ ID NO: 60138 - protein, 15 aa, Homo sapiens
CATLGVGTRRYFDLW

SEQ ID NO: 60139 - protein, 20 aa, Homo sapiens
CARLHSSGWHNYYYYGMDVW

SEQ ID NO: 60140 - protein, 21 aa, Homo sapiens
CARSSLRYFDWVFSNLAFDIW

SEQ ID NO: 60141 - protein, 16 aa, Homo sapiens
CARGDIVVPTYYFDYW

SEQ ID NO: 60142 - protein, 20 aa, Homo sapiens
CAKDINKYYYDSSGYAHDYW

SEQ ID NO: 60143 - protein, 22 aa, Homo sapiens
CARDKGGLGYGYVYYYYGMDVW

SEQ ID NO: 60144 - protein, 19 aa, Homo sapiens
CARGFRYSSSWRLYYFDYW

SEQ ID NO: 60145 - protein, 21 aa, Homo sapiens
CARRGDLGSCLTTECWYFDLW

SEQ ID NO: 60146 - protein, 22 aa, Homo sapiens
CARDLKVYLPDFDYYYYGMDVW

SEQ ID NO: 60147 - protein, 19 aa, Homo sapiens
CARDRGYCSGGSCLYGDYW

SEQ ID NO: 60148 - protein, 20 aa, Homo sapiens
CARSRDGYNLWGTDYAFDIW

SEQ ID NO: 60149 - protein, 22 aa, Homo sapiens
CAREGWGYYDSSGYYTSGFDYW

SEQ ID NO: 60150 - protein, 18 aa, Homo sapiens
CAVGFSNSPYYYYGMDVW

SEQ ID NO: 60151 - protein, 25 aa, Homo sapiens
CARDLVRVDYDNLTGYYISSGIDYW

SEQ ID NO: 60152 - protein, 22 aa, Homo sapiens
CATKPPTRYSSSWYRSPYFDYW

SEQ ID NO: 60153 - protein, 16 aa, Homo sapiens
CARERTAAIGVAFDIW

SEQ ID NO: 60154 - protein, 17 aa, Homo sapiens
CAKDQVDTATHHYFDYW

SEQ ID NO: 60155 - protein, 23 aa, Homo sapiens
CATLSDRYSSSWYYVPAVFFDYW

SEQ ID NO: 60156 - protein, 20 aa, Homo sapiens
CTTESDSGWPHYYYYGMDVW

SEQ ID NO: 60157 - protein, 21 aa, Homo sapiens
CAHSASEVLVGATGAEWFDPW

SEQ ID NO: 60158 - protein, 18 aa, Homo sapiens
CARDSGSYYLGFEYFQHW

SEQ ID NO: 60159 - protein, 23 aa, Homo sapiens
CARVNCGGDCYSYYYYYYGMDVW

SEQ ID NO: 60160 - protein, 15 aa, Homo sapiens
CARYYFGSGNWIDLW

SEQ ID NO: 60161 - protein, 15 aa, Homo sapiens
CARHDWNDSYAFDIW

SEQ ID NO: 60162 - protein, 22 aa, Homo sapiens
CARDSYSSSWYSDGQGEYFQHW

SEQ ID NO: 60163 - protein, 13 aa, Homo sapiens
CARQFSSGWYDSW

SEQ ID NO: 60164 - protein, 18 aa, Homo sapiens
CAKEAEDWLSIIRELDYW

SEQ ID NO: 60165 - protein, 18 aa, Homo sapiens
CARLDFFHTRPEYYFDYW

SEQ ID NO: 60166 - protein, 25 aa, Homo sapiens
CARGLGYESSGYFSPYFYQDGMDVW

SEQ ID NO: 60167 - protein, 20 aa, Homo sapiens
CAKDKIRTAANGGVGYFDYW

SEQ ID NO: 60168 - protein, 22 aa, Homo sapiens
CARRTFNHPDFFYGSGSFFDYW

SEQ ID NO: 60169 - protein, 27 aa, Homo sapiens
CARDQLSLSQWLTLGGPYYYYYGMDVW

SEQ ID NO: 60170 - protein, 17 aa, Homo sapiens
CARPPIAAARVWSPDYW

SEQ ID NO: 60171 - protein, 17 aa, Homo sapiens
CARVDTTVVDGGGFDPW

SEQ ID NO: 60172 - protein, 18 aa, Homo sapiens
CASLGSSSWYLRPWVDYW

SEQ ID NO: 60173 - protein, 24 aa, Homo sapiens
CARNDCSGGSCYIYYYYYYGMDVW

SEQ ID NO: 60174 - protein, 18 aa, Homo sapiens
CAKDHNSGYDEMYYFDYW

SEQ ID NO: 60175 - protein, 17 aa, Homo sapiens
CAKDGYFDSSGQGFDSW

SEQ ID NO: 60176 - protein, 20 aa, Homo sapiens
CTTHQGGIAVAGTDDAFDIW

SEQ ID NO: 60177 - protein, 16 aa, Homo sapiens
CAHRFGFGQTAYFDYW

SEQ ID NO: 60178 - protein, 22 aa, Homo sapiens
CARAGNYGDYESLYYYYGMDVW

SEQ ID NO: 60179 - protein, 13 aa, Homo sapiens
CARSYPCVRYDYW

SEQ ID NO: 60180 - protein, 17 aa, Homo sapiens
CAKDSRWELLAEPLDYW

SEQ ID NO: 60181 - protein, 24 aa, Homo sapiens
CARDQVGDCGGDCYYYYYYGMDVW

SEQ ID NO: 60182 - protein, 16 aa, Homo sapiens
CARVIAGDTSTPFDPW

SEQ ID NO: 60183 - protein, 23 aa, Homo sapiens
CARADLNPTAPNYDILTGSLDYW

SEQ ID NO: 60184 - protein, 24 aa, Homo sapiens
CASAPVTYSSGWYVALLGNWFDPW

SEQ ID NO: 60185 - protein, 19 aa, Homo sapiens
CARDAPPLWYGDYVRFDYW

SEQ ID NO: 60186 - protein, 18 aa, Homo sapiens
CARHRGGAIVVMSAFDIW

SEQ ID NO: 60187 - protein, 16 aa, Homo sapiens
CAKEGSGWPFEAADIW

SEQ ID NO: 60188 - protein, 15 aa, Homo sapiens
CARAPVVGATFFDYW

SEQ ID NO: 60189 - protein, 15 aa, Homo sapiens
CAKQDSITMAPFDPW

SEQ ID NO: 60190 - protein, 16 aa, Homo sapiens
CARMYSSGWTYYLDSW

SEQ ID NO: 60191 - protein, 19 aa, Homo sapiens
CAKGIVGATAYYYYGMDVW

SEQ ID NO: 60192 - protein, 21 aa, Homo sapiens
CARVTAYCGGDCSTPLLVDYW

SEQ ID NO: 60193 - protein, 17 aa, Homo sapiens
CAKTDTAMVTSWYFDLW

SEQ ID NO: 60194 - protein, 18 aa, Homo sapiens
CARGPAVWMTPTAPFDSW

SEQ ID NO: 60195 - protein, 21 aa, Homo sapiens
CAKPGAPTFSSRVVYFAMDVW

SEQ ID NO: 60196 - protein, 17 aa, Homo sapiens
CTREVEGATEDSPYDYW

SEQ ID NO: 60197 - protein, 21 aa, Homo sapiens
CATYYGEPGVPDYYYYGMDVW

SEQ ID NO: 60198 - protein, 20 aa, Homo sapiens
CAHRRGYCSSTSCYFGFDYW

SEQ ID NO: 60199 - protein, 21 aa, Homo sapiens
CAREPAAIGSSSWYRYYFDYW

SEQ ID NO: 60200 - protein, 18 aa, Homo sapiens
CAKDLKWLVQMGIYFDYW

SEQ ID NO: 60201 - protein, 13 aa, Homo sapiens
CTTVSGYDIFAYW

SEQ ID NO: 60202 - protein, 19 aa, Homo sapiens
CARWPRSWLGRPSYYFDYW

SEQ ID NO: 60203 - protein, 21 aa, Homo sapiens
CARDVRVRGYSGYELPYFDYW

SEQ ID NO: 60204 - protein, 12 aa, Homo sapiens
CARSFIAQDDYW

SEQ ID NO: 60205 - protein, 24 aa, Homo sapiens
CAKVGEHYYRILTGYHQLYYFDYW

SEQ ID NO: 60206 - protein, 20 aa, Homo sapiens
CARHGLNTGWYWAPSWFDPW

SEQ ID NO: 60207 - protein, 21 aa, Homo sapiens
CARDQRAVGATTGYYYGMDVW

SEQ ID NO: 60208 - protein, 15 aa, Homo sapiens
CARGPIGGSYEFDYW

SEQ ID NO: 60209 - protein, 20 aa, Homo sapiens
CARGYYGSGSYWDSAYFDYW

SEQ ID NO: 60210 - protein, 12 aa, Homo sapiens
CAEGFEGTVDYW

SEQ ID NO: 60211 - protein, 13 aa, Homo sapiens
CTRFKNEYAFDIW

SEQ ID NO: 60212 - protein, 26 aa, Homo sapiens
CARVRNSLYYDILTGYYTEEYYFDYW

SEQ ID NO: 60213 - protein, 21 aa, Homo sapiens
CARDMAYYDSSGYYYGEFDIW

SEQ ID NO: 60214 - protein, 14 aa, Homo sapiens
CARARDGYVNFDYW

SEQ ID NO: 60215 - protein, 20 aa, Homo sapiens
CARHATPIYSSGYWGHFDYW

SEQ ID NO: 60216 - protein, 13 aa, Homo sapiens
CQSADTTGSSVVF

SEQ ID NO: 60217 - protein, 17 aa, Homo sapiens
CAAYYYDSSGYYVSDYW

SEQ ID NO: 60218 - protein, 21 aa, Homo sapiens
CARDRPRGVRGVSYPSFFDSW

SEQ ID NO: 60219 - protein, 16 aa, Homo sapiens
CATAWTVQEDDYFDSW

SEQ ID NO: 60220 - protein, 22 aa, Homo sapiens
CAKSIMLLWFGEFPKNPYFDYW

SEQ ID NO: 60221 - protein, 19 aa, Homo sapiens
CARNYYDSSGYLFFGFDIW

SEQ ID NO: 60222 - protein, 19 aa, Homo sapiens
CARDGLPSIAAAEYWFDPW

SEQ ID NO: 60223 - protein, 20 aa, Homo sapiens
CTKDHPNTFGSGAHDWFDPW

SEQ ID NO: 60224 - protein, 22 aa, Homo sapiens
CATDRVEMATLPHYYYYGMDVW

SEQ ID NO: 60225 - protein, 18 aa, Homo sapiens
CAKDRRGEHYGSGSYDYW

SEQ ID NO: 60226 - protein, 24 aa, Homo sapiens
CARLPSTMVRGVIIASPFGYFDYW

SEQ ID NO: 60227 - protein, 16 aa, Homo sapiens
CAREGLWPIVAAFDIW

SEQ ID NO: 60228 - protein, 15 aa, Homo sapiens
CARDALAYGEGFDYW

SEQ ID NO: 60229 - protein, 24 aa, Homo sapiens
CASEAPEEAYDIGANFGDWYFDLW

SEQ ID NO: 60230 - protein, 14 aa, Homo sapiens
CATGEVVGATLDYW

SEQ ID NO: 60231 - protein, 25 aa, Homo sapiens
CARDQLEDIVVVVAGYYYYYGMDVW

SEQ ID NO: 60232 - protein, 20 aa, Homo sapiens
CAKDKAPYSSGWYEYYFDYW

SEQ ID NO: 60233 - protein, 20 aa, Homo sapiens
CAKDWGELSGGVPLYYFDYW

SEQ ID NO: 60234 - protein, 22 aa, Homo sapiens
CAREGIQLWPLTMLASQQIDYW

SEQ ID NO: 60235 - protein, 17 aa, Homo sapiens
CAHGRVMSAGSYYFDSW

SEQ ID NO: 60236 - protein, 20 aa, Homo sapiens
CARQDRVAGLGYYYYGMDVW

SEQ ID NO: 60237 - protein, 23 aa, Homo sapiens
CARGGTNRRIYDEYRLEWPLDYW

SEQ ID NO: 60238 - protein, 19 aa, Homo sapiens
CARLVTYYDLFTGGYFDNW

SEQ ID NO: 60239 - protein, 18 aa, Homo sapiens
CAKEGGGYSYGLYYLDRW

SEQ ID NO: 60240 - protein, 21 aa, Homo sapiens
CARERHRLRYFDPYYYGMDVW

SEQ ID NO: 60241 - protein, 26 aa, Homo sapiens
CARAPGIAIPSWVWQSPHYYYGMDVW

SEQ ID NO: 60242 - protein, 21 aa, Homo sapiens
CAKVSNLLLWFGELLTHFDYW

SEQ ID NO: 60243 - protein, 20 aa, Homo sapiens
CARARAEVIDGIAGRLFDYW

SEQ ID NO: 60244 - protein, 18 aa, Homo sapiens
CVPSNYYASGSYRWFDPW

SEQ ID NO: 60245 - protein, 18 aa, Homo sapiens
CARDPGGIAAEGNAFDIW

SEQ ID NO: 60246 - protein, 20 aa, Homo sapiens
CAKDTQWYSSSWYAYYFDYW

SEQ ID NO: 60247 - protein, 17 aa, Homo sapiens
CARDAIIASGNFNFDYW

SEQ ID NO: 60248 - protein, 15 aa, Homo sapiens
CARDPVGATYVFDIW

SEQ ID NO: 60249 - protein, 19 aa, Homo sapiens
CARDGGYTSSWYMGCPDYW

SEQ ID NO: 60250 - protein, 20 aa, Homo sapiens
CAKIPSGDLYSSSWQYFDYW

SEQ ID NO: 60251 - protein, 20 aa, Homo sapiens
CARIFYSPDAYYYYYGMDVW

SEQ ID NO: 60252 - protein, 22 aa, Homo sapiens
CARVGGLYCSGGSCPFGFFDYW

SEQ ID NO: 60253 - protein, 23 aa, Homo sapiens
CAKESGYCSGGRCFSGWFGFDYW

SEQ ID NO: 60254 - protein, 14 aa, Homo sapiens
CARGLIAVRGVDYW

SEQ ID NO: 60255 - protein, 18 aa, Homo sapiens
CANSFGWELLSDDAFDIW

SEQ ID NO: 60256 - protein, 11 aa, Homo sapiens
CQVWDSGTILF

SEQ ID NO: 60257 - protein, 26 aa, Homo sapiens
CAKPHSPVDIVATITFRGQHWYFDLW

SEQ ID NO: 60258 - protein, 21 aa, Homo sapiens
CARDPTNKKTPYVYNFRIDYW

SEQ ID NO: 60259 - protein, 19 aa, Homo sapiens
CAKEGAGGTSGIYWYFDLW

SEQ ID NO: 60260 - protein, 21 aa, Homo sapiens
CARVRGYDSSGYYPPEYFQHW

SEQ ID NO: 60261 - protein, 16 aa, Homo sapiens
CAHSRDLRYSLYFDYW

SEQ ID NO: 60262 - protein, 22 aa, Homo sapiens
CARLAFITMVRGVYYYYGMDVW

SEQ ID NO: 60263 - protein, 19 aa, Homo sapiens
CARDSIAVAGPGDWYFDLW

SEQ ID NO: 60264 - protein, 14 aa, Homo sapiens
CQSYDSSVSGNVVF

SEQ ID NO: 60265 - protein, 22 aa, Homo sapiens
CTTEYYFDSGDSYYDVYNFDYW

SEQ ID NO: 60266 - protein, 13 aa, Homo sapiens
CAHLTTPSLFDYW

SEQ ID NO: 60267 - protein, 19 aa, Homo sapiens
CARISSPIPGTTGWYFDPW

SEQ ID NO: 60268 - protein, 19 aa, Homo sapiens
CTRSCSGGSCYHSASFDYW

SEQ ID NO: 60269 - protein, 22 aa, Homo sapiens
CARDLWVSSGYLNYYYYGMDVW

SEQ ID NO: 60270 - protein, 18 aa, Homo sapiens
CARAVAGTRYANDWFDPW

SEQ ID NO: 60271 - protein, 21 aa, Homo sapiens
CARDTWKPVNYYDSSFAFDIW

SEQ ID NO: 60272 - protein, 18 aa, Homo sapiens
CARDFDYYDSSGSGFDYW

SEQ ID NO: 60273 - protein, 16 aa, Homo sapiens
CTKEAVRGYSFGSDYW

SEQ ID NO: 60274 - protein, 18 aa, Homo sapiens
CAKDRILDNGLWDEMDYW

SEQ ID NO: 60275 - protein, 12 aa, Homo sapiens
CQQRFNWDEYSF

SEQ ID NO: 60276 - protein, 16 aa, Homo sapiens
CAREEWAVERTEIDYW

SEQ ID NO: 60277 - protein, 18 aa, Homo sapiens
CARGGSYCSGGSCEFDYW

SEQ ID NO: 60278 - protein, 25 aa, Homo sapiens
CARDLSIFTYYYDSSQFGANWFDPW

SEQ ID NO: 60279 - protein, 14 aa, Homo sapiens
CAKLAWIAVEPDYW

SEQ ID NO: 60280 - protein, 21 aa, Homo sapiens
CARSVILLWFGNRYDNWFDPW

SEQ ID NO: 60281 - protein, 16 aa, Homo sapiens
CASWGFHSSGWWFDYW

SEQ ID NO: 60282 - protein, 22 aa, Homo sapiens
CARDGYSYYYDSSGYYGAFDIW

SEQ ID NO: 60283 - protein, 20 aa, Homo sapiens
CAKYGDIVATPNGTGAFDIW

SEQ ID NO: 60284 - protein, 16 aa, Homo sapiens
CARVLWRLRLYYFDYW

SEQ ID NO: 60285 - protein, 16 aa, Homo sapiens
CARIKVNGGNLGLDYW

SEQ ID NO: 60286 - protein, 21 aa, Homo sapiens
CAREPPGDSSSWFRLPYFDYW

SEQ ID NO: 60287 - protein, 22 aa, Homo sapiens
CASFLYYYDSSGYERPDAFDIW

SEQ ID NO: 60288 - protein, 19 aa, Homo sapiens
CARGGDGYNFAWLAIFDYW

SEQ ID NO: 60289 - protein, 23 aa, Homo sapiens
CARTSWYGGGRASNYYYYGMDVW

SEQ ID NO: 60290 - protein, 19 aa, Homo sapiens
CAKSRPVVTAVWEWYFDLW

SEQ ID NO: 60291 - protein, 22 aa, Homo sapiens
CARQILWFGELFLGGVSWFDPW

SEQ ID NO: 60292 - protein, 24 aa, Homo sapiens
CAKDLYSSGWYIGVDYYYYGMDVW

SEQ ID NO: 60293 - protein, 15 aa, Homo sapiens
CATVIVGAPNWFDPW

SEQ ID NO: 60294 - protein, 26 aa, Homo sapiens
CAKDGNVLLWFGEFKFSSKSSWFDPW

SEQ ID NO: 60295 - protein, 15 aa, Homo sapiens
CAADCGDDCHSGDYW

SEQ ID NO: 60296 - protein, 18 aa, Homo sapiens
CARVGAQYNWNDLYFDYW

SEQ ID NO: 60297 - protein, 14 aa, Homo sapiens
CAHRGVTTGVFDTW

SEQ ID NO: 60298 - protein, 25 aa, Homo sapiens
CARLYSAAYHYDRSGYSRGDYFDYW

SEQ ID NO: 60299 - protein, 18 aa, Homo sapiens
CARIPGFGEPTRDWFDPW

SEQ ID NO: 60300 - protein, 21 aa, Homo sapiens
CARDGQITFGGVIVIGGRDYW

SEQ ID NO: 60301 - protein, 21 aa, Homo sapiens
CAKDMRPTRTVTTHIGAFDIW

SEQ ID NO: 60302 - protein, 22 aa, Homo sapiens
CATEGWELLLNDVEHPRGFDYW

SEQ ID NO: 60303 - protein, 18 aa, Homo sapiens
CARGSSGSYYPYNWFDPW

SEQ ID NO: 60304 - protein, 19 aa, Homo sapiens
CARDKRGLWHHYYYGMDVW

SEQ ID NO: 60305 - protein, 15 aa, Homo sapiens
CARFGYEQWLVSDYW

SEQ ID NO: 60306 - protein, 22 aa, Homo sapiens
CARDFDYVGQSQTYYYYGMDVW

SEQ ID NO: 60307 - protein, 23 aa, Homo sapiens
CARDWCSSTSCSLVYYYYGMDVW

SEQ ID NO: 60308 - protein, 17 aa, Homo sapiens
CAHTVGYTYGETYFDYW

SEQ ID NO: 60309 - protein, 23 aa, Homo sapiens
CAREWSDYDILTGYYLHYYFDYW

SEQ ID NO: 60310 - protein, 18 aa, Homo sapiens
CARAGAAYCGGDCEFDYW

SEQ ID NO: 60311 - protein, 20 aa, Homo sapiens
CARDMMITFGGAYYYGMDVW

SEQ ID NO: 60312 - protein, 18 aa, Homo sapiens
CARDGWHSGYVENGFDYW

SEQ ID NO: 60313 - protein, 20 aa, Homo sapiens
CAIWADYDILTGYYGWFDPW

SEQ ID NO: 60314 - protein, 21 aa, Homo sapiens
CARAPKVNPTTYYYYYGMDVW

SEQ ID NO: 60315 - protein, 18 aa, Homo sapiens
CARAGYTATWYRPPFDYW

SEQ ID NO: 60316 - protein, 24 aa, Homo sapiens
CARGAGYFDWLHHLRYYYYGMDVW

SEQ ID NO: 60317 - protein, 16 aa, Homo sapiens
CAKDASGWNFWYFDLW

SEQ ID NO: 60318 - protein, 18 aa, Homo sapiens
CAIGGGGDGYNYPYFDYW

SEQ ID NO: 60319 - protein, 20 aa, Homo sapiens
CAKDLYTQEWELLPHHFDYW

SEQ ID NO: 60320 - protein, 20 aa, Homo sapiens
CAKILSHFGCGGYCHAFDIW

SEQ ID NO: 60321 - protein, 25 aa, Homo sapiens
CARNTHLYDSSGLESYYYYYGMDVW

SEQ ID NO: 60322 - protein, 21 aa, Homo sapiens
CAKGGELRDSCSGTSCYVDYW

SEQ ID NO: 60323 - protein, 19 aa, Homo sapiens
CAKDSSGYYYRDPNWFDPW

SEQ ID NO: 60324 - protein, 15 aa, Homo sapiens
CARVGPFLELWFDPW

SEQ ID NO: 60325 - protein, 16 aa, Homo sapiens
CARALKGGSYTFDDYW

SEQ ID NO: 60326 - protein, 24 aa, Homo sapiens
CARGGGCSGGSCYPRRGSTPFDPW

SEQ ID NO: 60327 - protein, 15 aa, Homo sapiens
CAHRGMWFGPLFDYW

SEQ ID NO: 60328 - protein, 15 aa, Homo sapiens
CVKSNGWYYRAFDLW

SEQ ID NO: 60329 - protein, 23 aa, Homo sapiens
CARDSGSSSSWYSVGYYYGMDVW

SEQ ID NO: 60330 - protein, 23 aa, Homo sapiens
CARGLVVYGEFIGLYYYYGMDVW

SEQ ID NO: 60331 - protein, 21 aa, Homo sapiens
CARQPGITYYYDSSGPYLDYW

SEQ ID NO: 60332 - protein, 19 aa, Homo sapiens
CATDHFDINDPPLWYFESW

SEQ ID NO: 60333 - protein, 18 aa, Homo sapiens
CARVAYSYVVNLYWFDPW

SEQ ID NO: 60334 - protein, 18 aa, Homo sapiens
CARGPEWWELSTEYFQHW

SEQ ID NO: 60335 - protein, 15 aa, Homo sapiens
CARNYYDSSDAFDIW

SEQ ID NO: 60336 - protein, 16 aa, Homo sapiens
CARDYCGGDCYEFQYW

SEQ ID NO: 60337 - protein, 17 aa, Homo sapiens
CARGGGWDLREYYFDYW

SEQ ID NO: 60338 - protein, 22 aa, Homo sapiens
CARGGWYSSGWMSHRYNWFDPW

SEQ ID NO: 60339 - protein, 19 aa, Homo sapiens
CAKGPWYSSGWYGNYFDYW

SEQ ID NO: 60340 - protein, 21 aa, Homo sapiens
CAKADEQLVVQFYYYYGMDVW

SEQ ID NO: 60341 - protein, 19 aa, Homo sapiens
CAREKAAAGIFQPDAFDIW

SEQ ID NO: 60342 - protein, 21 aa, Homo sapiens
CARDDYYDSSGYYSTYNFDYW

SEQ ID NO: 60343 - protein, 24 aa, Homo sapiens
CAREPPLHCSGGSCYSFSGYFDYW

SEQ ID NO: 60344 - protein, 23 aa, Homo sapiens
CARGEMILYDYVWGDIEDGMDVW

SEQ ID NO: 60345 - protein, 18 aa, Homo sapiens
CARDSPDYGDSIHYFDFW

SEQ ID NO: 60346 - protein, 20 aa, Homo sapiens
CAKAPMARYGSGTKYYFDYW

SEQ ID NO: 60347 - protein, 15 aa, Homo sapiens
CAKDTGAWYTPFDSW

SEQ ID NO: 60348 - protein, 16 aa, Homo sapiens
CAKLPYYDISYAFDIW

SEQ ID NO: 60349 - protein, 16 aa, Homo sapiens
CARHESVGILTPIDYW

SEQ ID NO: 60350 - protein, 18 aa, Homo sapiens
CARESYLWFGELSYFDYW

SEQ ID NO: 60351 - protein, 18 aa, Homo sapiens
CGRDWPLLDYGTTWFDPW

SEQ ID NO: 60352 - protein, 26 aa, Homo sapiens
CARVDFPGHFDWLHPRYYYYYGMDVW

SEQ ID NO: 60353 - protein, 24 aa, Homo sapiens
CARVVGYYDSSGYLYDFKYYFDYW

SEQ ID NO: 60354 - protein, 16 aa, Homo sapiens
CARGGGTAMDDAFDIW

SEQ ID NO: 60355 - protein, 15 aa, Homo sapiens
CTTDRGSYYVWLDYW

SEQ ID NO: 60356 - protein, 18 aa, Homo sapiens
CASAGQIEAAGIFYFGSW

SEQ ID NO: 60357 - protein, 20 aa, Homo sapiens
CVRRGLEYVDWLEIDSFDVW

SEQ ID NO: 60358 - protein, 23 aa, Homo sapiens
CARGYVGYSSSWSFYYYYGMDVW

SEQ ID NO: 60359 - protein, 22 aa, Homo sapiens
CARGGTVPAAMIGLYYYALDVW

SEQ ID NO: 60360 - protein, 19 aa, Homo sapiens
CARDYYDSSGYYPGYFDLW

SEQ ID NO: 60361 - protein, 18 aa, Homo sapiens
CARHLKVYSVAAAYFDYW

SEQ ID NO: 60362 - protein, 22 aa, Homo sapiens
CARPRLVGATGSPYYYYGMDVW

SEQ ID NO: 60363 - protein, 26 aa, Homo sapiens
CARDMFVKDSSGYYYVSYYYYGMDVW

SEQ ID NO: 60364 - protein, 18 aa, Homo sapiens
CARRLYGSGSYFTAFDIW

SEQ ID NO: 60365 - protein, 17 aa, Homo sapiens
CASLRIGYSYDYGMDVW

SEQ ID NO: 60366 - protein, 23 aa, Homo sapiens
CARDFWAYSSSWSPYYYYGMDVW

SEQ ID NO: 60367 - protein, 19 aa, Homo sapiens
CARHNEPDSGYDPNWFDSW

SEQ ID NO: 60368 - protein, 19 aa, Homo sapiens
CARDDYGSGSSYSAPFDYW

SEQ ID NO: 60369 - protein, 16 aa, Homo sapiens
CAASSGWYVEGYFDLW

SEQ ID NO: 60370 - protein, 17 aa, Homo sapiens
CAREASGIRILYYFDYW

SEQ ID NO: 60371 - protein, 22 aa, Homo sapiens
CARFEGGYYSSGSSDGRGFDYW

SEQ ID NO: 60372 - protein, 15 aa, Homo sapiens
CARSNVDTAMAKDYW

SEQ ID NO: 60373 - protein, 22 aa, Homo sapiens
CATFPAYYYGSGTYRVTGFDPW

SEQ ID NO: 60374 - protein, 18 aa, Homo sapiens
CAKVRAVAGTTTGAFDIW

SEQ ID NO: 60375 - protein, 18 aa, Homo sapiens
CAKRGVSGGSSPSLFDYW

SEQ ID NO: 60376 - protein, 20 aa, Homo sapiens
CAKAQRRSSSYYTFSAVDVW

SEQ ID NO: 60377 - protein, 13 aa, Homo sapiens
CAREVGEGGFDPW

SEQ ID NO: 60378 - protein, 15 aa, Homo sapiens
CATATGGYDLRIDYW

SEQ ID NO: 60379 - protein, 23 aa, Homo sapiens
CARGTIAADMHDDYYYYYGMDVW

SEQ ID NO: 60380 - protein, 27 aa, Homo sapiens
CTTDGLYCSGGSCYGPNYYYYYGMDVW

SEQ ID NO: 60381 - protein, 18 aa, Homo sapiens
CARETEDRYSSSWYSDYW

SEQ ID NO: 60382 - protein, 17 aa, Homo sapiens
CAKGGGYSYAQGGFDYW

SEQ ID NO: 60383 - protein, 21 aa, Homo sapiens
CARTLWRGAGTWPYYYGMDVW

SEQ ID NO: 60384 - protein, 17 aa, Homo sapiens
CAHRRTGWYSSTLNDYW

SEQ ID NO: 60385 - protein, 11 aa, Homo sapiens
CLLYYGTTQIF

SEQ ID NO: 60386 - protein, 19 aa, Homo sapiens
CARDNGSGRIELHDAFDIW

SEQ ID NO: 60387 - protein, 17 aa, Homo sapiens
CASQGHSSGYYYLFDYW

SEQ ID NO: 60388 - protein, 22 aa, Homo sapiens
CAKRHETYHSGSSGYSLAFDVW

SEQ ID NO: 60389 - protein, 25 aa, Homo sapiens
CARHRSSHYDSGTYYKRVNDAFDVW

SEQ ID NO: 60390 - protein, 17 aa, Homo sapiens
CAKDRITMIVSNWLDYW

SEQ ID NO: 60391 - protein, 15 aa, Homo sapiens
CAHSFSTSGWKPDYW

SEQ ID NO: 60392 - protein, 16 aa, Homo sapiens
CAHRQLQLVRGYFDYW

SEQ ID NO: 60393 - protein, 20 aa, Homo sapiens
CARLNGDYDLSRGSNWFDPW

SEQ ID NO: 60394 - protein, 12 aa, Homo sapiens
CARDIRNSFDPW

SEQ ID NO: 60395 - protein, 25 aa, Homo sapiens
CTRHLDPYGSGSYTPPYYYYGMDVW

SEQ ID NO: 60396 - protein, 18 aa, Homo sapiens
CARVPTPLGDYVPYFDYW

SEQ ID NO: 60397 - protein, 17 aa, Homo sapiens
CARHAVRGVNTLDFDYW

SEQ ID NO: 60398 - protein, 23 aa, Homo sapiens
CAKSASCYYSWSGCEPRGFFDLW

SEQ ID NO: 60399 - protein, 16 aa, Homo sapiens
CASNSGSFEPRAFDYW

SEQ ID NO: 60400 - protein, 22 aa, Homo sapiens
CARGGVPLYYYDSSGYYDLDYW

SEQ ID NO: 60401 - protein, 12 aa, Homo sapiens
CAHSTPQGIDYW

SEQ ID NO: 60402 - protein, 21 aa, Homo sapiens
CAREVGSGIWGSDGLYYFDYW

SEQ ID NO: 60403 - protein, 18 aa, Homo sapiens
CARHGVDYGDYGGYFQHW

SEQ ID NO: 60404 - protein, 16 aa, Homo sapiens
CARHLPTQFAGPLDYW

SEQ ID NO: 60405 - protein, 21 aa, Homo sapiens
CTTGDYDYVWGSYRYSAFDIW

SEQ ID NO: 60406 - protein, 23 aa, Homo sapiens
CAKATFTVTTKAATYYYYGMDVW

SEQ ID NO: 60407 - protein, 24 aa, Homo sapiens
CAREVRLWRNYYGSEIYSDWFDLW

SEQ ID NO: 60408 - protein, 23 aa, Homo sapiens
CARLKSVWGSYRPSLYYYGMDVW

SEQ ID NO: 60409 - protein, 23 aa, Homo sapiens
CAKDGESQWLVLGASGEYYFDYW

SEQ ID NO: 60410 - protein, 16 aa, Homo sapiens
CARGIMVSGTFWFDPW

SEQ ID NO: 60411 - protein, 17 aa, Homo sapiens
CAYSSGYYRAVYWFDPW

SEQ ID NO: 60412 - protein, 14 aa, Homo sapiens
CAKDMYSSSFFDSW

SEQ ID NO: 60413 - protein, 17 aa, Homo sapiens
CARDSYGVPATAIPDYW

SEQ ID NO: 60414 - protein, 19 aa, Homo sapiens
CARSDYDILTGSTKMFDPW

SEQ ID NO: 60415 - protein, 17 aa, Homo sapiens
CAREGQVAAAGTSIDYW

SEQ ID NO: 60416 - protein, 16 aa, Homo sapiens
CARLVRGVMLGSFDNW

SEQ ID NO: 60417 - protein, 20 aa, Homo sapiens
CARDGGYSSSWNEDNWFDPW

SEQ ID NO: 60418 - protein, 21 aa, Homo sapiens
CATGGYSSSWIRFRYNWFDPW

SEQ ID NO: 60419 - protein, 21 aa, Homo sapiens
CAKDWELHYYDTDDARNPDYW

SEQ ID NO: 60420 - protein, 15 aa, Homo sapiens
CARDRAYGDSSRDYW

SEQ ID NO: 60421 - protein, 17 aa, Homo sapiens
CAREPWLDDRSYFFDSW

SEQ ID NO: 60422 - protein, 22 aa, Homo sapiens
CARGVMITFGGVIVDMYYFDYW

SEQ ID NO: 60423 - protein, 22 aa, Homo sapiens
CARATGYSSSWYDLPAEYFQHW

SEQ ID NO: 60424 - protein, 19 aa, Homo sapiens
CARASGTRPSSGLNWFDPW

SEQ ID NO: 60425 - protein, 17 aa, Homo sapiens
CARTRDPHTAMVFFDYW

SEQ ID NO: 60426 - protein, 17 aa, Homo sapiens
CAKGRGFLTGFYLFDCW

SEQ ID NO: 60427 - protein, 15 aa, Homo sapiens
CAKDSGPAAILIDYW

SEQ ID NO: 60428 - protein, 15 aa, Homo sapiens
CARERSYPENYFDYW

SEQ ID NO: 60429 - protein, 18 aa, Homo sapiens
CAKGRLQHDYGDGEFDYW

SEQ ID NO: 60430 - protein, 19 aa, Homo sapiens
CARLEGGVFCGGDCYFNYW

SEQ ID NO: 60431 - protein, 21 aa, Homo sapiens
CARQALGYCSGGSCDEAFDIW

SEQ ID NO: 60432 - protein, 16 aa, Homo sapiens
CAKDVSGGSYYEFDYW

SEQ ID NO: 60433 - protein, 17 aa, Homo sapiens
CAKGYTGNYYTEYFQDW

SEQ ID NO: 60434 - protein, 18 aa, Homo sapiens
CARDVRLGLRSSGAWDYW

SEQ ID NO: 60435 - protein, 20 aa, Homo sapiens
CARSMRFYYDSSGYWPFEYW

SEQ ID NO: 60436 - protein, 27 aa, Homo sapiens
CARCPGYYDSSGYYFWGQIEHDAFDIW

SEQ ID NO: 60437 - protein, 21 aa, Homo sapiens
CASEVLTLADTAMVTYYFDYW

SEQ ID NO: 60438 - protein, 18 aa, Homo sapiens
CTRHRTDIPVAGTGFDYW

SEQ ID NO: 60439 - protein, 16 aa, Homo sapiens
CAHRPFGLGAGYFDLW

SEQ ID NO: 60440 - protein, 15 aa, Homo sapiens
CARDFSAGTGSFDYW

SEQ ID NO: 60441 - protein, 19 aa, Homo sapiens
CARHRGLFTIAAGNWFDPW

SEQ ID NO: 60442 - protein, 19 aa, Homo sapiens
CAKDHRSLLWFGDDYFDYW

SEQ ID NO: 60443 - protein, 18 aa, Homo sapiens
CATERYYYGSGTGPLDYW

SEQ ID NO: 60444 - protein, 21 aa, Homo sapiens
CARGVNYYDGGGFWGWYFDLW

SEQ ID NO: 60445 - protein, 20 aa, Homo sapiens
CAHTEYYYRSGTNRDAFHMW

SEQ ID NO: 60446 - protein, 22 aa, Homo sapiens
CARGLAYYDILTGYYWSGADYW

SEQ ID NO: 60447 - protein, 16 aa, Homo sapiens
CAKDRYSTIWYVFDYW

SEQ ID NO: 60448 - protein, 24 aa, Homo sapiens
CARGSVVVPAPHANYYYYYGMDVW

SEQ ID NO: 60449 - protein, 11 aa, Homo sapiens [sequence omitted]

SEQ ID NO: 60450 - protein, 21 aa, Homo sapiens
CARDSGSLGGSYYYYYGMDVW

SEQ ID NO: 60451 - protein, 16 aa, Homo sapiens
CARGGHWPDTNWFDPW

SEQ ID NO: 60452 - protein, 18 aa, Homo sapiens
CAFRTYYYDSSGYNGDYW

SEQ ID NO: 60453 - protein, 21 aa, Homo sapiens
CARDWARLGAALSGLDAFDVW

SEQ ID NO: 60454 - protein, 17 aa, Homo sapiens
CVKDFHTSTWYSVFDVW

SEQ ID NO: 60455 - protein, 21 aa, Homo sapiens
CARDHTLDYYGSGTEGYFDYW

SEQ ID NO: 60456 - protein, 14 aa, Homo sapiens
CARWERPIAAFDPW

SEQ ID NO: 60457 - protein, 16 aa, Homo sapiens
CASLQVYSGYDFVDYW

SEQ ID NO: 60458 - protein, 16 aa, Homo sapiens
CAKGTDGYNYLPFDPW

SEQ ID NO: 60459 - protein, 20 aa, Homo sapiens
CARDGWSRIATYSYYGMDVW

SEQ ID NO: 60460 - protein, 21 aa, Homo sapiens
CAREGYCSSTSCHARGWFDPW

SEQ ID NO: 60461 - protein, 18 aa, Homo sapiens
CAHKRSVVAAPSHYFDYW

SEQ ID NO: 60462 - protein, 25 aa, Homo sapiens
CARLKALWFGELGGGKSQHDYFDYW

SEQ ID NO: 60463 - protein, 22 aa, Homo sapiens
CATDRVDGYGPLYYYYYGMDVW

SEQ ID NO: 60464 - protein, 17 aa, Homo sapiens
CARDRAEDSGTYVFDYW

SEQ ID NO: 60465 - protein, 13 aa, Homo sapiens
CARGITSPAFDYW

SEQ ID NO: 60466 - protein, 17 aa, Homo sapiens
CAPTPTFSGYDYLFDYW

SEQ ID NO: 60467 - protein, 16 aa, Homo sapiens
CARDARDGYSYYFDYW

SEQ ID NO: 60468 - protein, 14 aa, Homo sapiens
CAKPYDSTGYYNYW

SEQ ID NO: 60469 - protein, 20 aa, Homo sapiens
CQAHGEGYYDSSGYSAFDIW

SEQ ID NO: 60470 - protein, 19 aa, Homo sapiens
CATGRANYYGSGSYEFDYW

SEQ ID NO: 60471 - protein, 17 aa, Homo sapiens
CAHRRGGSGWWGSFDYW

SEQ ID NO: 60472 - protein, 20 aa, Homo sapiens
CARGGFGELLTDYYYGMDVW

SEQ ID NO: 60473 - protein, 14 aa, Homo sapiens
CARLWDTAGYFDYW

SEQ ID NO: 60474 - protein, 23 aa, Homo sapiens
CVKDPQLGVAVPAASLYNYFDAW

SEQ ID NO: 60475 - protein, 22 aa, Homo sapiens
CARDQRSLYFGDFLRSSLSDYW

SEQ ID NO: 60476 - protein, 20 aa, Homo sapiens
CARAPWLSLVFRYYYGMDVW

SEQ ID NO: 60477 - protein, 20 aa, Homo sapiens
CANYGHLQYCGGRGCYPDYW

SEQ ID NO: 60478 - protein, 20 aa, Homo sapiens
CAKSHRVYCSGDSCYSVDYW

SEQ ID NO: 60479 - protein, 17 aa, Homo sapiens
CAKEGSSGWYRPYFDYW

SEQ ID NO: 60480 - protein, 26 aa, Homo sapiens
CAREPSIGYCSGGSCYGYYYYGMDVW

SEQ ID NO: 60481 - protein, 18 aa, Homo sapiens
CARDPGQWLVRRNWFDPW

SEQ ID NO: 60482 - protein, 17 aa, Homo sapiens
CAKDAQTLILTGYFDYW

SEQ ID NO: 60483 - protein, 16 aa, Homo sapiens
CARDLGLWPSTWFDPW

SEQ ID NO: 60484 - protein, 28 aa, Homo sapiens
CARDYRGRDESLNPYYKPAYYYYGMDVW

SEQ ID NO: 60485 - protein, 19 aa, Homo sapiens
CARAEYCSSTSCRGSFDYW

SEQ ID NO: 60486 - protein, 13 aa, Homo sapiens
CARTNYGSGIDYW

SEQ ID NO: 60487 - protein, 15 aa, Homo sapiens
CTPNSGSSWHPFDYW

SEQ ID NO: 60488 - protein, 25 aa, Homo sapiens
CARAPIPYDYVWGSYRYGVSWFDPW

SEQ ID NO: 60489 - protein, 16 aa, Homo sapiens
CARDLGSSGFRQFDYW

SEQ ID NO: 60490 - protein, 23 aa, Homo sapiens
CARDYVDIVATIWGLQSHAVDIW

SEQ ID NO: 60491 - protein, 19 aa, Homo sapiens
CAHSRHDYVWGSYRSFDYW

SEQ ID NO: 60492 - protein, 16 aa, Homo sapiens
CAHRGIAAAGPYFQHW

SEQ ID NO: 60493 - protein, 19 aa, Homo sapiens
CARATGDGVLFVYWYFDLW

SEQ ID NO: 60494 - protein, 20 aa, Homo sapiens
CARRNYGDFGVNRKGGFDYW

SEQ ID NO: 60495 - protein, 20 aa, Homo sapiens
CARPRYCSSSSCWGDGFDIW

SEQ ID NO: 60496 - protein, 25 aa, Homo sapiens
CATDHNCSGGTCYSGRDYYYGMDVW

SEQ ID NO: 60497 - protein, 20 aa, Homo sapiens
CARGRVFWSYLPEYNWFDPW

SEQ ID NO: 60498 - protein, 15 aa, Homo sapiens
CAKAVYNWNENFDYW

SEQ ID NO: 60499 - protein, 23 aa, Homo sapiens
CARDLDHTEAVYGDKSYWYFDLW

SEQ ID NO: 60500 - protein, 14 aa, Homo sapiens
CARDRTVAGWFDPW

SEQ ID NO: 60501 - protein, 27 aa, Homo sapiens
CARRHGIAAAGTLSGFDYYYYYGMDVW

SEQ ID NO: 60502 - protein, 20 aa, Homo sapiens
CARDAPITYYYDSADAFDIW

SEQ ID NO: 60503 - protein, 19 aa, Homo sapiens
CARRDYGDFTTYYYAMDVW

SEQ ID NO: 60504 - protein, 24 aa, Homo sapiens
CARGVDGYYYDSSGYYVPDAFDIW

SEQ ID NO: 60505 - protein, 23 aa, Homo sapiens
CARAVVTPRMGKSPYYFHALDVW

SEQ ID NO: 60506 - protein, 15 aa, Homo sapiens
CATGRPPTPYYFDYW

SEQ ID NO: 60507 - protein, 20 aa, Homo sapiens
CATAKWIAVAGIDQGAFDIW

SEQ ID NO: 60508 - protein, 13 aa, Homo sapiens
CAHRRAVTEFDQW

SEQ ID NO: 60509 - protein, 14 aa, Homo sapiens
CARVDWALNWFDPW

SEQ ID NO: 60510 - protein, 18 aa, Homo sapiens
CARDHGDYGFGFYYFDYW

SEQ ID NO: 60511 - protein, 22 aa, Homo sapiens
CASVDIVATIIGPYYYYGMDVW

SEQ ID NO: 60512 - protein, 15 aa, Homo sapiens
CAKDLGGSGWDFDYW

SEQ ID NO: 60513 - protein, 27 aa, Homo sapiens
CARGHSPPYYDILTGSRYYYYYGMDVW

SEQ ID NO: 60514 - protein, 17 aa, Homo sapiens
CARGGSAVAGTIYFDYW

SEQ ID NO: 60515 - protein, 18 aa, Homo sapiens
CARVGSGYYSAVNWFDPW

SEQ ID NO: 60516 - protein, 13 aa, Homo sapiens
CARDAGWHRKDYW

SEQ ID NO: 60517 - protein, 17 aa, Homo sapiens
CARFDSDNWYLGWFDPW

SEQ ID NO: 60518 - protein, 20 aa, Homo sapiens
CARMYYDILTGYGSDAFDIW

SEQ ID NO: 60519 - protein, 24 aa, Homo sapiens
CANTWGSLGPWSSVDYYYYGMDVW

SEQ ID NO: 60520 - protein, 19 aa, Homo sapiens
CAKEDSAGFGLPFDAFDMW

SEQ ID NO: 60521 - protein, 23 aa, Homo sapiens
CARSPDRGGWLQLRWADDAFDIW

SEQ ID NO: 60522 - protein, 16 aa, Homo sapiens
CARDRDLRSNWYFDLW

SEQ ID NO: 60523 - protein, 23 aa, Homo sapiens
CAKDYMVVAATRDYYYYYGMDVW

SEQ ID NO: 60524 - protein, 18 aa, Homo sapiens
CARDFRGKSLIVYYFQFW

SEQ ID NO: 60525 - protein, 29 aa, Homo sapiens
CAKDTAYYDILTGYLRVRSVYYYYGMDVW

SEQ ID NO: 60526 - protein, 26 aa, Homo sapiens
CASYYYDSSGYYYGHKYSWYYGMDVW

SEQ ID NO: 60527 - protein, 22 aa, Homo sapiens
CARLVRYCSGGRCSGSGWFDPW

SEQ ID NO: 60528 - protein, 18 aa, Homo sapiens
CARVNTLGGYYYYGMDVW

SEQ ID NO: 60529 - protein, 19 aa, Homo sapiens
CAKDQRIQLWLNDCYFDYW

SEQ ID NO: 60530 - protein, 18 aa, Homo sapiens
CARFYNRITYYYYGMDVW

SEQ ID NO: 60531 - protein, 22 aa, Homo sapiens
CARDLGLIGQWLALSYWYFDLW

SEQ ID NO: 60532 - protein, 27 aa, Homo sapiens
CAREIGSSWYNSAHTQPVTLGDAFDIW

SEQ ID NO: 60533 - protein, 31 aa, Homo sapiens
CANAADIVLPPAVVSVQKKPARSVAGALDYW

SEQ ID NO: 60534 - protein, 23 aa, Homo sapiens
CARDIVVVPTTIYDPTDNWFDSW

SEQ ID NO: 60535 - protein, 22 aa, Homo sapiens
CARDGANGPRIAVAGTNRFDYW

SEQ ID NO: 60536 - protein, 17 aa, Homo sapiens
CARDRLSSRSWYVFDYW

SEQ ID NO: 60537 - protein, 22 aa, Homo sapiens
CAKDNVYCSSTSCYGQDYFDYW

SEQ ID NO: 60538 - protein, 19 aa, Homo sapiens
CAKDTDPMVRGVINAFDIW

SEQ ID NO: 60539 - protein, 19 aa, Homo sapiens
CAHTPFYYDNRGKYYFDYW

SEQ ID NO: 60540 - protein, 21 aa, Homo sapiens
CASKSGEMATIIYYYYGMDVW

SEQ ID NO: 60541 - protein, 17 aa, Homo sapiens
CARHMTTVLSPPWFDPW

SEQ ID NO: 60542 - protein, 16 aa, Homo sapiens
CARAPYSSGHIFGDYW

SEQ ID NO: 60543 - protein, 21 aa, Homo sapiens
CASEFLSYGDYANYYYGMDVW

SEQ ID NO: 60544 - protein, 17 aa, Homo sapiens
CATRLDHSTTWFSFDDW

SEQ ID NO: 60545 - protein, 15 aa, Homo sapiens
CARGGRGFNFANDYW

SEQ ID NO: 60546 - protein, 15 aa, Homo sapiens
CARTSANLAAAADVW

SEQ ID NO: 60547 - protein, 18 aa, Homo sapiens
CAKDLGAVPGTGDGFDIW

SEQ ID NO: 60548 - protein, 20 aa, Homo sapiens
CASLGYSSGWLYYYYGMDVW

SEQ ID NO: 60549 - protein, 13 aa, Homo sapiens
CARVTRDATTDYW

SEQ ID NO: 60550 - protein, 18 aa, Homo sapiens
CARDPMLWFGERNGFDYW

SEQ ID NO: 60551 - protein, 20 aa, Homo sapiens
CTTYRVDDYVWGSYRYTSYW

SEQ ID NO: 60552 - protein, 21 aa, Homo sapiens
CARDARYDSSGCSLVPFFDYW

SEQ ID NO: 60553 - protein, 17 aa, Homo sapiens
CAKVWDDILTGYDFDYW

SEQ ID NO: 60554 - protein, 14 aa, Homo sapiens
CARGFKWLVPIDYW

SEQ ID NO: 60555 - protein, 16 aa, Homo sapiens
CARGAGSSSGSYPDYW

SEQ ID NO: 60556 - protein, 17 aa, Homo sapiens
CALCGYGSGSNNWFDPW

SEQ ID NO: 60557 - protein, 15 aa, Homo sapiens
CNSRDTSVNHVDVAF

SEQ ID NO: 60558 - protein, 15 aa, Homo sapiens
CTSGSGSYRTTFDYW

SEQ ID NO: 60559 - protein, 18 aa, Homo sapiens
CARDGYDRSGYYYYFDNW

SEQ ID NO: 60560 - protein, 16 aa, Homo sapiens
CAHKPVGWLVPYFDYW

SEQ ID NO: 60561 - protein, 22 aa, Homo sapiens
CARTQIAVAGTFVYYYYGMDVW

SEQ ID NO: 60562 - protein, 12 aa, Homo sapiens
CQQYFDTPRITF

SEQ ID NO: 60563 - protein, 22 aa, Homo sapiens
CAKHPSVVVVVAATSPYYFDYW

SEQ ID NO: 60564 - protein, 25 aa, Homo sapiens
CAREEDIVVVVAATPIYYYYGMDVW

SEQ ID NO: 60565 - protein, 18 aa, Homo sapiens
CARRRVVVPLDGGWFDPW

SEQ ID NO: 60566 - protein, 20 aa, Homo sapiens
CAKDDLIAAGHPIGAAFDIW

SEQ ID NO: 60567 - protein, 23 aa, Homo sapiens
CARAYSSGWYVLSPYYYYGMDVW

SEQ ID NO: 60568 - protein, 18 aa, Homo sapiens
CARHSVFQMVHGGYFDYW

SEQ ID NO: 60569 - protein, 11 aa, Homo sapiens [sequence omitted]

SEQ ID NO: 60570 - protein, 19 aa, Homo sapiens
CARDLGFRTYNYEGYFEYW

SEQ ID NO: 60571 - protein, 23 aa, Homo sapiens
CARHWPNRSYSYDRSGYPNLDYW

SEQ ID NO: 60572 - protein, 17 aa, Homo sapiens
CARVGTWIQLPNYFDYW

SEQ ID NO: 60573 - protein, 12 aa, Homo sapiens
CQELKSYPVYSF

SEQ ID NO: 60574 - protein, 20 aa, Homo sapiens
CARDEIAADDLNYYYGMDVW

SEQ ID NO: 60575 - protein, 21 aa, Homo sapiens
CARVGYYDSSGSLAAEYFQHW

SEQ ID NO: 60576 - protein, 18 aa, Homo sapiens
CARDFGTVTVSRRALDIW

SEQ ID NO: 60577 - protein, 23 aa, Homo sapiens
CAREIPEDIVVVPAALPNWFDPW

SEQ ID NO: 60578 - protein, 18 aa, Homo sapiens
CARDPTVVTPIDYYFDYW

SEQ ID NO: 60579 - protein, 21 aa, Homo sapiens
CATVGYPRSSSWYVREYFDLW

SEQ ID NO: 60580 - protein, 21 aa, Homo sapiens
CAKDAPPGGSGSYFNNWFDPW

SEQ ID NO: 60581 - protein, 20 aa, Homo sapiens
CARLASGYSSGWYQYYFDYW

SEQ ID NO: 60582 - protein, 13 aa, Homo sapiens
CQVWDISTFHVLF

SEQ ID NO: 60583 - protein, 20 aa, Homo sapiens
CAKRNSYYGSGSYYNQIDYW

SEQ ID NO: 60584 - protein, 16 aa, Homo sapiens
CARHKQRLTLDTFDVW

SEQ ID NO: 60585 - protein, 18 aa, Homo sapiens
CAKAGRVAAAADWYFDLW

SEQ ID NO: 60586 - protein, 17 aa, Homo sapiens
CARMWPSIQMWYFFDMW

SEQ ID NO: 60587 - protein, 14 aa, Homo sapiens
CTRVNQFAWYADYW

SEQ ID NO: 60588 - protein, 19 aa, Homo sapiens
CARDKPERTTGTLYYFDYW

SEQ ID NO: 60589 - protein, 22 aa, Homo sapiens
CAKDTGDGYYYGSGSDYAFDYW

SEQ ID NO: 60590 - protein, 24 aa, Homo sapiens
CARLATTVVTPTSPSGYYYGMDVW

SEQ ID NO: 60591 - protein, 16 aa, Homo sapiens
CAKCGGWHINANFDSW

SEQ ID NO: 60592 - protein, 18 aa, Homo sapiens
CARIGHDYGGTKGAFDYW

SEQ ID NO: 60593 - protein, 12 aa, Homo sapiens
CANQNAGGPDYW

SEQ ID NO: 60594 - protein, 20 aa, Homo sapiens
CARQVYDYLWGRYRYRFDYW

SEQ ID NO: 60595 - protein, 17 aa, Homo sapiens
CAVPANSHYSYYGFDVW

SEQ ID NO: 60596 - protein, 26 aa, Homo sapiens
CARGGHRGYSSWSSTLDYYYYGMDVW

SEQ ID NO: 60597 - protein, 18 aa, Homo sapiens
CARVDGSGNYNNGCFDYW

SEQ ID NO: 60598 - protein, 18 aa, Homo sapiens
CAHGSLGGYSYGFWFDPW

SEQ ID NO: 60599 - protein, 24 aa, Homo sapiens
CARFTTDDHQAPRSRVGSWYFDLW

SEQ ID NO: 60600 - protein, 22 aa, Homo sapiens
CARDLWGTGGYEDYYYYGMDVW

SEQ ID NO: 60601 - protein, 23 aa, Homo sapiens
CARNSYVYSYGSRPGLREHIDYW

SEQ ID NO: 60602 - protein, 16 aa, Homo sapiens
CARMALQGGIVAFDYW

SEQ ID NO: 60603 - protein, 17 aa, Homo sapiens
CARLGASGLLRGYFDLW

SEQ ID NO: 60604 - protein, 23 aa, Homo sapiens
CARDTSPLLWFGERLTNDAFDIW

SEQ ID NO: 60605 - protein, 22 aa, Homo sapiens
CAKEESRRKGYSSGWYSWFDPW

SEQ ID NO: 60606 - protein, 15 aa, Homo sapiens
CARDKVGGDYALDYW

SEQ ID NO: 60607 - protein, 19 aa, Homo sapiens
CARGVRVVVVIGANWFDPW

SEQ ID NO: 60608 - protein, 18 aa, Homo sapiens
CARLKREGAISFPALDYW

SEQ ID NO: 60609 - protein, 18 aa, Homo sapiens
CATSPPFGYLSPRYFDLW

SEQ ID NO: 60610 - protein, 20 aa, Homo sapiens
CAKEWLTTGTTGYYYGMDVW

SEQ ID NO: 60611 - protein, 16 aa, Homo sapiens
CAHRPNYDILTGFDYW

SEQ ID NO: 60612 - protein, 22 aa, Homo sapiens
CARTHCSGGSCYLSYYYGMDVW

SEQ ID NO: 60613 - protein, 16 aa, Homo sapiens
CARGPTEAAADHFDYW

SEQ ID NO: 60614 - protein, 16 aa, Homo sapiens
CAKDIRGYDHDGLDYW

SEQ ID NO: 60615 - protein, 23 aa, Homo sapiens
CAREQWIQLWLENSYYYYGMDVW

SEQ ID NO: 60616 - protein, 19 aa, Homo sapiens
CATAHSYILTGYHASFDPW

SEQ ID NO: 60617 - protein, 16 aa, Homo sapiens
CASSLAAAMFRAFDIW

SEQ ID NO: 60618 - protein, 20 aa, Homo sapiens
CARLEVVATTSRPSYYFDYW

SEQ ID NO: 60619 - protein, 16 aa, Homo sapiens
CARVASVVGAIFFDYW

SEQ ID NO: 60620 - protein, 19 aa, Homo sapiens
CWVGNYYDSSGYYQGVDYW

SEQ ID NO: 60621 - protein, 24 aa, Homo sapiens
CARGSRWFGEKGLVWQGYNWFDPW

SEQ ID NO: 60622 - protein, 16 aa, Homo sapiens
CQQYDNLPPLLRSLTF

SEQ ID NO: 60623 - protein, 15 aa, Homo sapiens
CARDPDDSSGPLDYW

SEQ ID NO: 60624 - protein, 15 aa, Homo sapiens
CTRRITTIFFALDYW

SEQ ID NO: 60625 - protein, 24 aa, Homo sapiens
CAKVGSSIQWLVLGAGAQYYFDYW

SEQ ID NO: 60626 - protein, 15 aa, Homo sapiens
CARIAWGTVPGFDYW

SEQ ID NO: 60627 - protein, 21 aa, Homo sapiens
CARHRGITMIVVVIPSHFDYW

SEQ ID NO: 60628 - protein, 23 aa, Homo sapiens
CAREVYSSSWYKPLYYYYGMDVW

SEQ ID NO: 60629 - protein, 25 aa, Homo sapiens
CAHSLVGATEGYSGYLYYYYGMDVW

SEQ ID NO: 60630 - protein, 15 aa, Homo sapiens
CARVSVGYFDWTDYW

SEQ ID NO: 60631 - protein, 26 aa, Homo sapiens
CARDPNPPPSMVRGVIINYYYGMDVW

SEQ ID NO: 60632 - protein, 27 aa, Homo sapiens
CAKVPMAGSGSYSIASVTKTQYYFDYW

SEQ ID NO: 60633 - protein, 19 aa, Homo sapiens
CAKSYGGTSLYYYYGMDVW

SEQ ID NO: 60634 - protein, 17 aa, Homo sapiens
CATSRQNYYDSSGYDYW

SEQ ID NO: 60635 - protein, 22 aa, Homo sapiens
CARDGPYSSSWYRETNWYFDLW

SEQ ID NO: 60636 - protein, 23 aa, Homo sapiens
CARAPSSYDILTGYYLSGYFDYW

SEQ ID NO: 60637 - protein, 26 aa, Homo sapiens
CARQLGYCSTATCYPQDYYYVAMDVW

SEQ ID NO: 60638 - protein, 18 aa, Homo sapiens
CAKPAVAGTFRVFYFDYW

SEQ ID NO: 60639 - protein, 19 aa, Homo sapiens
CARGDSSNYYGHAYYFDYW

SEQ ID NO: 60640 - protein, 18 aa, Homo sapiens
CAKVQSIAVAGTYYFDSW

SEQ ID NO: 60641 - protein, 16 aa, Homo sapiens
CARPRFVGQGGAFDIW

SEQ ID NO: 60642 - protein, 16 aa, Homo sapiens
CATHYGDPPGPWFDPW

SEQ ID NO: 60643 - protein, 21 aa, Homo sapiens
CAKGTGSYCDGACSSRVLDYW

SEQ ID NO: 60644 - protein, 16 aa, Homo sapiens
CVRETYGDYENWFDTW

SEQ ID NO: 60645 - protein, 13 aa, Homo sapiens
CQSFDSSLMFDVF

SEQ ID NO: 60646 - protein, 22 aa, Homo sapiens
CARANDILTGYYRWGVHAFDIW

SEQ ID NO: 60647 - protein, 16 aa, Homo sapiens
CAREGLLGGNSGLDYW

SEQ ID NO: 60648 - protein, 20 aa, Homo sapiens
CARAQLRYFDWLLSEGEDYW

SEQ ID NO: 60649 - protein, 27 aa, Homo sapiens
CARDFLKADCSGGSCYPYYYYYGMDVW

SEQ ID NO: 60650 - protein, 20 aa, Homo sapiens
CARHRPVNYYYGSGSYYDYW

SEQ ID NO: 60651 - protein, 22 aa, Homo sapiens
CARTTAGVTMIVVVIPSWFDPW

SEQ ID NO: 60652 - protein, 21 aa, Homo sapiens
CASCPFDWLFYSSGPGAFDTW

SEQ ID NO: 60653 - protein, 16 aa, Homo sapiens
CARDPSMVRGVNGDYW

SEQ ID NO: 60654 - protein, 20 aa, Homo sapiens
CATEVSFGELSHYYYGMDVW

SEQ ID NO: 60655 - protein, 20 aa, Homo sapiens
CAKEQSYFGALTVYTWFDPW

SEQ ID NO: 60656 - protein, 14 aa, Homo sapiens
CARIHSAGLGMDYW

SEQ ID NO: 60657 - protein, 16 aa, Homo sapiens
CAKGGRGSYLDYFDYW

SEQ ID NO: 60658 - protein, 15 aa, Homo sapiens
CARVLMIPIHAFDIW

SEQ ID NO: 60659 - protein, 17 aa, Homo sapiens
CARDSTEVGPLDALDLW

SEQ ID NO: 60660 - protein, 20 aa, Homo sapiens
CARGGITLVRGVQYNWFGPW

SEQ ID NO: 60661 - protein, 23 aa, Homo sapiens
CATHTKPRLAYCGGDCYSPVDYW

SEQ ID NO: 60662 - protein, 24 aa, Homo sapiens
CARDHGGYYDILTGYYAVGRFDYW

SEQ ID NO: 60663 - protein, 22 aa, Homo sapiens
CARDAEGYYDSSDYPSDYFDFW

SEQ ID NO: 60664 - protein, 17 aa, Homo sapiens
CARYLRGASRDDAFDIW

SEQ ID NO: 60665 - protein, 20 aa, Homo sapiens
CARRKEADSPEHPHWYFNIW

SEQ ID NO: 60666 - protein, 14 aa, Homo sapiens
CAKDQATVTTPDYW

SEQ ID NO: 60667 - protein, 20 aa, Homo sapiens
CARETANIRPGGVYNYFDSW

SEQ ID NO: 60668 - protein, 16 aa, Homo sapiens
CARHELWFGESPFDYW

SEQ ID NO: 60669 - protein, 16 aa, Homo sapiens
CAKPRGSYPNYYFDYW

SEQ ID NO: 60670 - protein, 17 aa, Homo sapiens
CARLFSSGYYLFPFDYW

SEQ ID NO: 60671 - protein, 22 aa, Homo sapiens
CARARWGNDYGDYEQKYYFDYW

SEQ ID NO: 60672 - protein, 21 aa, Homo sapiens
CARGKIVGALGAWYYYGMDVW

SEQ ID NO: 60673 - protein, 19 aa, Homo sapiens
CARDQAIAAAGTRYYFDYW

SEQ ID NO: 60674 - protein, 17 aa, Homo sapiens
CASGPHYFDNSRWFDPW

SEQ ID NO: 60675 - protein, 25 aa, Homo sapiens
CARVQGRGSGWYWESSHYYYGMDVW

SEQ ID NO: 60676 - protein, 15 aa, Homo sapiens
CAGNPNSGWPYFDYW

SEQ ID NO: 60677 - protein, 14 aa, Homo sapiens
CAHKGILWFGFDYW

SEQ ID NO: 60678 - protein, 14 aa, Homo sapiens
CVKEGDTGWCFDSW

SEQ ID NO: 60679 - protein, 16 aa, Homo sapiens
CARETYGSRSFRFDSW

SEQ ID NO: 60680 - protein, 16 aa, Homo sapiens
CARIPVAAAGSPFDYW

SEQ ID NO: 60681 - protein, 18 aa, Homo sapiens
CARDHNDVLSGFYPLDYW

SEQ ID NO: 60682 - protein, 18 aa, Homo sapiens
CASGPEMATIGDWYFDLW

SEQ ID NO: 60683 - protein, 14 aa, Homo sapiens
CASLSSGLNQLDYW

SEQ ID NO: 60684 - protein, 22 aa, Homo sapiens
CAMLEYYDYVWGSYRSSYFDYW

SEQ ID NO: 60685 - protein, 19 aa, Homo sapiens
CAKDRDLVVSGYYYGMDVW

SEQ ID NO: 60686 - protein, 19 aa, Homo sapiens
CAREVRELLGDGRKWFDPW

SEQ ID NO: 60687 - protein, 23 aa, Homo sapiens
CARSGVEWWSPKLGVGPGYFDYW

SEQ ID NO: 60688 - protein, 20 aa, Homo sapiens
CARDGYNYERPLGVVTFDYW

SEQ ID NO: 60689 - protein, 19 aa, Homo sapiens
CARAVYHQTLVSHYYFDYW

SEQ ID NO: 60690 - protein, 17 aa, Homo sapiens
CARHQFIAVAGTGFDYW

SEQ ID NO: 60691 - protein, 20 aa, Homo sapiens
CARGQVHPSGDGEYNWFDPW

SEQ ID NO: 60692 - protein, 22 aa, Homo sapiens
CARDRGEMATIAVVRGGWFDPW

SEQ ID NO: 60693 - protein, 18 aa, Homo sapiens
CARVGVGANFGVTAFDIW

SEQ ID NO: 60694 - protein, 14 aa, Homo sapiens
CASGSTVTKDFDYW

SEQ ID NO: 60695 - protein, 16 aa, Homo sapiens
CATGGPSRGDDAFDIW

SEQ ID NO: 60696 - protein, 23 aa, Homo sapiens
CASGEYYYGSGIVPNHFSWFDPW

SEQ ID NO: 60697 - protein, 18 aa, Homo sapiens
CARGIGTSVYYSRNFDYW

SEQ ID NO: 60698 - protein, 18 aa, Homo sapiens
CAREGVGWELLVRAFDIW

SEQ ID NO: 60699 - protein, 23 aa, Homo sapiens
CANNEGGMVRGVINYYYYGMDVW

SEQ ID NO: 60700 - protein, 17 aa, Homo sapiens
CARQDKWFGDLNWFDPW

SEQ ID NO: 60701 - protein, 24 aa, Homo sapiens
CARSHWYYDSSGRPMGFTDGVDYW

SEQ ID NO: 60702 - protein, 22 aa, Homo sapiens
CARYTPDYGGNSAYYYYGMDVW

SEQ ID NO: 60703 - protein, 23 aa, Homo sapiens
CAKPLWFGELLYPVSSYWYFDLW

SEQ ID NO: 60704 - protein, 27 aa, Homo sapiens
CARCGWGSCSRSSCYYGDSYYYGMDVW

SEQ ID NO: 60705 - protein, 21 aa, Homo sapiens
CARDGWVTLGTTYYYYGMDVW

SEQ ID NO: 60706 - protein, 22 aa, Homo sapiens
CARDTYYDILTGLLSPIPFDYW

SEQ ID NO: 60707 - protein, 17 aa, Homo sapiens
CARDTPLDYGGNSGDYW

SEQ ID NO: 60708 - protein, 20 aa, Homo sapiens
CARHGYSSSWYISEGWFDPW

SEQ ID NO: 60709 - protein, 25 aa, Homo sapiens
CARGELRYFDWLLSADIGVGWFDPW

SEQ ID NO: 60710 - protein, 14 aa, Homo sapiens
CVRVTGAGNTGDYW

SEQ ID NO: 60711 - protein, 24 aa, Homo sapiens
CAREKGEASSGWYRAYYYYGMDVW

SEQ ID NO: 60712 - protein, 25 aa, Homo sapiens
CARVGGSTMVRGVIITNYYYGMDVW

SEQ ID NO: 60713 - protein, 23 aa, Homo sapiens
CARNFQPRAGIGSTWHADWLDPW

SEQ ID NO: 60714 - protein, 14 aa, Homo sapiens
CARSPTFILGFDYW

SEQ ID NO: 60715 - protein, 17 aa, Homo sapiens
CASAHYTSGSYYAFDIW

SEQ ID NO: 60716 - protein, 18 aa, Homo sapiens
CAREEHHWNEWNDAFDIW

SEQ ID NO: 60717 - protein, 18 aa, Homo sapiens
CASRLAYCGGDCRLPDYW

SEQ ID NO: 60718 - protein, 22 aa, Homo sapiens
CARSVTGNGRRYYDSSGYYPYW

SEQ ID NO: 60719 - protein, 20 aa, Homo sapiens
CARALWKRMIVVVINGIDYW

SEQ ID NO: 60720 - protein, 28 aa, Homo sapiens
CARDEGITAAGTGWNEKVVYYYHGMDVW

SEQ ID NO: 60721 - protein, 13 aa, Homo sapiens
CANGGAFHYFDNW

SEQ ID NO: 60722 - protein, 17 aa, Homo sapiens
CARGSVTGTTRDAFAIW

SEQ ID NO: 60723 - protein, 21 aa, Homo sapiens
CARASVLRYFDWSSYWYFDLW

SEQ ID NO: 60724 - protein, 25 aa, Homo sapiens
CASRVYGSGSYYWRLGYYYYGMDVW

SEQ ID NO: 60725 - protein, 23 aa, Homo sapiens
CARLGDSGGYYITRYYYYGMDVW

SEQ ID NO: 60726 - protein, 15 aa, Homo sapiens
CAHLETGSTFPFDSW

SEQ ID NO: 60727 - protein, 22 aa, Homo sapiens
CARDRKILGSPDDASDWAFDIW

SEQ ID NO: 60728 - protein, 18 aa, Homo sapiens
CARDLDTLPFGPDAFDIW

SEQ ID NO: 60729 - protein, 23 aa, Homo sapiens
CARGRVGLLWFGELIGGNWFDPW

SEQ ID NO: 60730 - protein, 21 aa, Homo sapiens
CARDMTTVTSVDDYYYGMDVW

SEQ ID NO: 60731 - protein, 11 aa, Homo sapiens
CAKAWYRIDYW

SEQ ID NO: 60732 - protein, 23 aa, Homo sapiens
CARQVGPIYSSGWYKGGNWFDPW

SEQ ID NO: 60733 - protein, 21 aa, Homo sapiens
CAREGSYCSSTSCHYWYFDLW

SEQ ID NO: 60734 - protein, 21 aa, Homo sapiens
CARHLSYDLLTDYWDYFFDLW

SEQ ID NO: 60735 - protein, 20 aa, Homo sapiens
CARDRLGFASGWSADGFDIW

SEQ ID NO: 60736 - protein, 25 aa, Homo sapiens
CARGVRYFDWSIIRGPNPSNWFDPW

SEQ ID NO: 60737 - protein, 17 aa, Homo sapiens
CTTTLGYSSGWYAFDYW

SEQ ID NO: 60738 - protein, 20 aa, Homo sapiens
CARHGYSSSWYVHEYYFDYW

SEQ ID NO: 60739 - protein, 15 aa, Homo sapiens
CAREFPSRVGWFDPW

SEQ ID NO: 60740 - protein, 16 aa, Homo sapiens
CARLSVPLGWRYFDLW

SEQ ID NO: 60741 - protein, 16 aa, Homo sapiens
CARPAPRYSSGAFSYW

SEQ ID NO: 60742 - protein, 23 aa, Homo sapiens
CAKGEWYYYDSSGYYSPYYFDYW

SEQ ID NO: 60743 - protein, 28 aa, Homo sapiens
CARDRKYYDILTGYFPLRSYYYYGMDVW

SEQ ID NO: 60744 - protein, 17 aa, Homo sapiens
CARDLVDPTGGYYFDYW

SEQ ID NO: 60745 - protein, 18 aa, Homo sapiens
CARGGWSSSSRYNWFDPW

SEQ ID NO: 60746 - protein, 23 aa, Homo sapiens
CAREDWGSSWYPEPYYYYGMDVW

SEQ ID NO: 60747 - protein, 14 aa, Homo sapiens
CAKDLGYYGSGDYW

SEQ ID NO: 60748 - protein, 17 aa, Homo sapiens
CASNNQEWFGELYFDPW

SEQ ID NO: 60749 - protein, 17 aa, Homo sapiens
CARGDEQWLDNWYFDLW

SEQ ID NO: 60750 - protein, 18 aa, Homo sapiens
CARQWGIAVAGNNWFDPW

SEQ ID NO: 60751 - protein, 21 aa, Homo sapiens
CARQVLYCSSTSCYEVLFDPW

SEQ ID NO: 60752 - protein, 18 aa, Homo sapiens
CVRDSAGVEGAPDAFDVW

SEQ ID NO: 60753 - protein, 18 aa, Homo sapiens
CAKDSIVWQWHPEPFDIW

SEQ ID NO: 60754 - protein, 23 aa, Homo sapiens
CARGRYSSGWYQLHKAKYYFDYW

SEQ ID NO: 60755 - protein, 23 aa, Homo sapiens
CAKVLGLDGDYVPEQNEDAFDVW

SEQ ID NO: 60756 - protein, 18 aa, Homo sapiens
CARGRRDYYDSSNWFDPW

SEQ ID NO: 60757 - protein, 31 aa, Homo sapiens
CAKDLPPQGVTFGELLYAPWVDYYYYGMDVW

SEQ ID NO: 60758 - protein, 18 aa, Homo sapiens
CTTEGSGIVVVMFAFDIW

SEQ ID NO: 60759 - protein, 20 aa, Homo sapiens
CVKDLDDYDDYFFGDAFDMW

SEQ ID NO: 60760 - protein, 14 aa, Homo sapiens
CARAPNRDNWFDPW

SEQ ID NO: 60761 - protein, 20 aa, Homo sapiens
CAKDKGGAYVWGSYRSFDYW

SEQ ID NO: 60762 - protein, 29 aa, Homo sapiens
CARDRLIVVVPAATPTAPFDYYYYGMDVW

SEQ ID NO: 60763 - protein, 20 aa, Homo sapiens
CARDFLMVAHEYYYYGMDVW

SEQ ID NO: 60764 - protein, 13 aa, Homo sapiens
CARIRQGWVADYW

SEQ ID NO: 60765 - protein, 19 aa, Homo sapiens
CARGRMASITGSVGVFDYW

SEQ ID NO: 60766 - protein, 17 aa, Homo sapiens
CAKVPPETSYYYGMDVW

SEQ ID NO: 60767 - protein, 23 aa, Homo sapiens
CARAAHPLIYGSFTPILYYFDYW

SEQ ID NO: 60768 - protein, 15 aa, Homo sapiens
CARDAAYNGHNFDVW

SEQ ID NO: 60769 - protein, 26 aa, Homo sapiens
CAATWDSSGWYGGGWGGYYYYGMDVW

SEQ ID NO: 60770 - protein, 21 aa, Homo sapiens
CASTIYYDSSGYYYRDAFDIW

SEQ ID NO: 60771 - protein, 21 aa, Homo sapiens
CARSGWHLHDGYYYYYGMDVW

SEQ ID NO: 60772 - protein, 25 aa, Homo sapiens
CARDWVEYCSGGSCYYYYYYGMDVW

SEQ ID NO: 60773 - protein, 21 aa, Homo sapiens
CTTEGEVLEVGMVRGVIIDYW

SEQ ID NO: 60774 - protein, 20 aa, Homo sapiens
CAKDNGNYFGSGNLHAFDIW

SEQ ID NO: 60775 - protein, 17 aa, Homo sapiens
CVRVGRDETAFDDFDHW

SEQ ID NO: 60776 - protein, 21 aa, Homo sapiens
CARESGVSSGYYYPRGYFDYW

SEQ ID NO: 60777 - protein, 18 aa, Homo sapiens
CARHPDYGDSYDPYIDYW

SEQ ID NO: 60778 - protein, 19 aa, Homo sapiens
CAKANDIVVVVPLNWFDPW

SEQ ID NO: 60779 - protein, 23 aa, Homo sapiens
CARADYITMVRGVLRSYWYFDLW

SEQ ID NO: 60780 - protein, 15 aa, Homo sapiens
CQAFDISTAGPLGVF

SEQ ID NO: 60781 - protein, 23 aa, Homo sapiens
CARDDVAWHTVSSWYFSGWFDPW

SEQ ID NO: 60782 - protein, 22 aa, Homo sapiens
CARQKNRYYDGSDYYRDHFDYW

SEQ ID NO: 60783 - protein, 16 aa, Homo sapiens
CAKDIGSGGWYTFDYW

SEQ ID NO: 60784 - protein, 18 aa, Homo sapiens
CTRQECRGGSCYNANDYW

SEQ ID NO: 60785 - protein, 16 aa, Homo sapiens
CASGVNRQWTDAFDIW

SEQ ID NO: 60786 - protein, 15 aa, Homo sapiens
CAKVATITEGAFDIW

SEQ ID NO: 60787 - protein, 26 aa, Homo sapiens
CARDNGYTHPDEQIGAHYYYYGMDVW

SEQ ID NO: 60788 - protein, 19 aa, Homo sapiens
CASPPVGDPLDYYYGMDVW

SEQ ID NO: 60789 - protein, 17 aa, Homo sapiens
CAKTRAVAGRFRAFDMW

SEQ ID NO: 60790 - protein, 18 aa, Homo sapiens
CARAVLVSGWLQYTFDYW

SEQ ID NO: 60791 - protein, 24 aa, Homo sapiens
CARASLLRYFDWLSTVENWYFDLW

SEQ ID NO: 60792 - protein, 25 aa, Homo sapiens
CARLWSLRYFDWLPMGVYSNWFDPW

SEQ ID NO: 60793 - protein, 26 aa, Homo sapiens
CARDDPRYCSGGSCYRIYYYYGMDVW

SEQ ID NO: 60794 - protein, 20 aa, Homo sapiens
CARDMAAAGRDLYYYGMDVW

SEQ ID NO: 60795 - protein, 19 aa, Homo sapiens
CAKDLEYYGSGSYYLFDYW

SEQ ID NO: 60796 - protein, 19 aa, Homo sapiens
CAKRGGGPYYDSSGYIDYW

SEQ ID NO: 60797 - protein, 28 aa, Homo sapiens
CAKDLRRWNYDILTGYYTTYYYYGMDVW

SEQ ID NO: 60798 - protein, 18 aa, Homo sapiens
CARDKGLSGTYFGNFDNW

SEQ ID NO: 60799 - protein, 21 aa, Homo sapiens
CARLVLRGIAAAAIYGYFDYW

SEQ ID NO: 60800 - protein, 22 aa, Homo sapiens
CARDYNGESHSAGFYYYGMDVW

SEQ ID NO: 60801 - protein, 22 aa, Homo sapiens
CATDLGWFGELLTTSNYYFDYW

SEQ ID NO: 60802 - protein, 27 aa, Homo sapiens
CATAFTIAAAGTGTEFHYYYYYGMDVW

SEQ ID NO: 60803 - protein, 17 aa, Homo sapiens
CARDFYYGDGAYAFDIW

SEQ ID NO: 60804 - protein, 18 aa, Homo sapiens
CASTQVSVTVALFHFDSW

SEQ ID NO: 60805 - protein, 21 aa, Homo sapiens
CARGNYDILTGRSPSDAFDTW

SEQ ID NO: 60806 - protein, 20 aa, Homo sapiens
CAKSGAKKRSSSASYYFDYW

SEQ ID NO: 60807 - protein, 25 aa, Homo sapiens
CARGYYFGSGTRYTALYYYYGMDLW

SEQ ID NO: 60808 - protein, 20 aa, Homo sapiens
CARAYTAMVTGYYYYGMDVW

SEQ ID NO: 60809 - protein, 18 aa, Homo sapiens
CARERWFGELRAPRFDPW

SEQ ID NO: 60810 - protein, 20 aa, Homo sapiens
CAKTLSIDGSGSFYYPFDYW

SEQ ID NO: 60811 - protein, 20 aa, Homo sapiens
CVRTDDGARVLGPWHFFDLW

SEQ ID NO: 60812 - protein, 18 aa, Homo sapiens
CAKDRSSWYVGSYYFDYW

SEQ ID NO: 60813 - protein, 19 aa, Homo sapiens
CATGPPFMVRGRDYWFDPW

SEQ ID NO: 60814 - protein, 18 aa, Homo sapiens
CARDGPMTTVTNRYFDLW

SEQ ID NO: 60815 - protein, 20 aa, Homo sapiens
CTRGGFCSGGSCHGALFDYW

SEQ ID NO: 60816 - protein, 24 aa, Homo sapiens
CAHLMYRPPSYYYDSSGYYYFDYW

SEQ ID NO: 60817 - protein, 22 aa, Homo sapiens
CARVSYYGSGSFAYYYYGMDVW

SEQ ID NO: 60818 - protein, 15 aa, Homo sapiens
CQSADSSATPTGWVF

SEQ ID NO: 60819 - protein, 14 aa, Homo sapiens
CARVPQTYSPIDYW

SEQ ID NO: 60820 - protein, 26 aa, Homo sapiens
CTTELRQTYYYDSSGYWDAWWYFDLW

SEQ ID NO: 60821 - protein, 14 aa, Homo sapiens
CAKPTQYSGWTDYW

SEQ ID NO: 60822 - protein, 14 aa, Homo sapiens
CARNWVHGEQFDYW

SEQ ID NO: 60823 - protein, 18 aa, Homo sapiens
CARVTGGDGNAYTHLDYW

SEQ ID NO: 60824 - protein, 24 aa, Homo sapiens
CAKHSCSAISCYAGGSPTNWFDPW

SEQ ID NO: 60825 - protein, 20 aa, Homo sapiens
CARQFSASLFWTRNFYFDFW

SEQ ID NO: 60826 - protein, 18 aa, Homo sapiens
CARKSVMVVPATYAFDIW

SEQ ID NO: 60827 - protein, 20 aa, Homo sapiens
CVKSYYYDSSDYWGDFFDMW

SEQ ID NO: 60828 - protein, 13 aa, Homo sapiens
CQHLNTYPLMYTF

SEQ ID NO: 60829 - protein, 18 aa, Homo sapiens
CARGYYDSSGYHNWFDPW

SEQ ID NO: 60830 - protein, 26 aa, Homo sapiens
CAHSPDGRYYDILTGYNYERYYFDYW

SEQ ID NO: 60831 - protein, 19 aa, Homo sapiens
CARVFRTALVTSRWYFDLW

SEQ ID NO: 60832 - protein, 16 aa, Homo sapiens
CAKDNGLAVAGSPDYW

SEQ ID NO: 60833 - protein, 23 aa, Homo sapiens
CAHSTMITFGGVIVKGMDWFDPW

SEQ ID NO: 60834 - protein, 13 aa, Homo sapiens
CASWDRFANFDYW

SEQ ID NO: 60835 - protein, 13 aa, Homo sapiens
CARGALAETEDYW

SEQ ID NO: 60836 - protein, 22 aa, Homo sapiens
CARGYYDSSGYYRDYPYYFDYW

SEQ ID NO: 60837 - protein, 15 aa, Homo sapiens
CARWVVAGPAGFDSW

SEQ ID NO: 60838 - protein, 21 aa, Homo sapiens
CARGGSLYGSGWSPHYAMDVW

SEQ ID NO: 60839 - protein, 18 aa, Homo sapiens
CAKDTYTSNWSYWSFDLW

SEQ ID NO: 60840 - protein, 24 aa, Homo sapiens
CARDVASSGWYVGTSYYYYGMDVW

SEQ ID NO: 60841 - protein, 19 aa, Homo sapiens
CARTRITIFTALTPELDYW

SEQ ID NO: 60842 - protein, 14 aa, Homo sapiens [sequence omitted]

SEQ ID NO: 60843 - protein, 23 aa, Homo sapiens
CARDMWAAAGTEDYYYYYGMDVW

SEQ ID NO: 60844 - protein, 19 aa, Homo sapiens
CARAFHSYGFPSYWYFDLW

SEQ ID NO: 60845 - protein, 21 aa, Homo sapiens
CARPEGVGAAPHYYYYGMDVW

SEQ ID NO: 60846 - protein, 23 aa, Homo sapiens
CARVFQYSSGWYRLAYYYGMDVW

SEQ ID NO: 60847 - protein, 17 aa, Homo sapiens
CASGSYSSSWYLLFDYW

SEQ ID NO: 60848 - protein, 14 aa, Homo sapiens
CARLSYSGTYYEYW

SEQ ID NO: 60849 - protein, 23 aa, Homo sapiens
CAREGAVLRYFDWLQTNHAFDIW

SEQ ID NO: 60850 - protein, 18 aa, Homo sapiens
CAKDKSSGSYYNPPFDYW

SEQ ID NO: 60851 - protein, 17 aa, Homo sapiens
CVRRPRHNVAMFYLDYW

SEQ ID NO: 60852 - protein, 17 aa, Homo sapiens
CARDKYDDILTGYYPYW

SEQ ID NO: 60853 - protein, 17 aa, Homo sapiens
CARERQYGGNSAPNDYW

SEQ ID NO: 60854 - protein, 26 aa, Homo sapiens
CAIPHSSSWSPDPYDVRYYYYGMDVW

SEQ ID NO: 60855 - protein, 21 aa, Homo sapiens
CARGPGKQQLVTDYYYGMDVW

SEQ ID NO: 60856 - protein, 18 aa, Homo sapiens
CAKRWSGQATRGNSYDYW

SEQ ID NO: 60857 - protein, 17 aa, Homo sapiens
CARDHAWQTADDAFDIW

SEQ ID NO: 60858 - protein, 20 aa, Homo sapiens
CARGFLQLRIFSGLYYFDYW

SEQ ID NO: 60859 - protein, 20 aa, Homo sapiens
CARGGYSSSWYAPPKSFDYW

SEQ ID NO: 60860 - protein, 18 aa, Homo sapiens
CARIVQSGWYLHPLIDYW

SEQ ID NO: 60861 - protein, 16 aa, Homo sapiens
CARPVGTNLKYYFGYW

SEQ ID NO: 60862 - protein, 17 aa, Homo sapiens
CAKGGWGDYTDHAFDIW

SEQ ID NO: 60863 - protein, 18 aa, Homo sapiens
CATIEWEPASGEYYFDYW

SEQ ID NO: 60864 - protein, 22 aa, Homo sapiens
CARMGYGTYSNSYYYYYGMDVW

SEQ ID NO: 60865 - protein, 24 aa, Homo sapiens
CAKPRTDDYYGSGEYYYYYGMDVW

SEQ ID NO: 60866 - protein, 16 aa, Homo sapiens
CAHRGRWYSGSSFDYW

SEQ ID NO: 60867 - protein, 23 aa, Homo sapiens
CTTDLRIYYDSSGYYYRNYFDYW

SEQ ID NO: 60868 - protein, 17 aa, Homo sapiens
CARDNSGGSSSAVFDPW

SEQ ID NO: 60869 - protein, 18 aa, Homo sapiens
CARDPGYNGFERNCFDSW

SEQ ID NO: 60870 - protein, 17 aa, Homo sapiens
CNLYYYGSGSYFGFDYW

SEQ ID NO: 60871 - protein, 15 aa, Homo sapiens
CQQYGSSPDHPSPSF

SEQ ID NO: 60872 - protein, 18 aa, Homo sapiens
CTRDSDASGWRPWYFDAW

SEQ ID NO: 60873 - protein, 24 aa, Homo sapiens
CAKDRGDVVVTAAATKRAYYFDYW

SEQ ID NO: 60874 - protein, 18 aa, Homo sapiens
CARGYDILTAYYTPSDYW

SEQ ID NO: 60875 - protein, 26 aa, Homo sapiens
CAKDGVYYDSSGYYYTNYYYYGMDVW

SEQ ID NO: 60876 - protein, 13 aa, Homo sapiens
CVGGGGTGNFDYW

SEQ ID NO: 60877 - protein, 18 aa, Homo sapiens
CAINRGLYDIPLQPLDYW

SEQ ID NO: 60878 - protein, 22 aa, Homo sapiens
CAREGVLYFNELIHSYWYFDFW

SEQ ID NO: 60879 - protein, 16 aa, Homo sapiens
CARWYSGSFRTGFDYW

SEQ ID NO: 60880 - protein, 19 aa, Homo sapiens
CATSRGTVTTFYYYGMDVW

SEQ ID NO: 60881 - protein, 23 aa, Homo sapiens
CARDSHLYRVTHFSSRDDAFDIW

SEQ ID NO: 60882 - protein, 25 aa, Homo sapiens
CARDLRELYLGLWFGELLTMGFDPW

SEQ ID NO: 60883 - protein, 21 aa, Homo sapiens
CARGGWHKVQGSYYYYGMDVW

SEQ ID NO: 60884 - protein, 16 aa, Homo sapiens
CARPATGGYEVNFDCW

SEQ ID NO: 60885 - protein, 22 aa, Homo sapiens
CARDIVVVPAAISIDYFAMDVW

SEQ ID NO: 60886 - protein, 15 aa, Homo sapiens
CAHSVTEKMIWFDPW

SEQ ID NO: 60887 - protein, 22 aa, Homo sapiens
CATLTGYSSSWPHLSAEYFQHW

SEQ ID NO: 60888 - protein, 22 aa, Homo sapiens
CARDLAAADAPGYYYYYGMDVW

SEQ ID NO: 60889 - protein, 17 aa, Homo sapiens
CATSSIPSTMVGWFDPW

SEQ ID NO: 60890 - protein, 19 aa, Homo sapiens
CARQSFWFGEPTLDWFDPW

SEQ ID NO: 60891 - protein, 16 aa, Homo sapiens
CARDRGIVATNYFDYW

SEQ ID NO: 60892 - protein, 18 aa, Homo sapiens
CARDSPHSNSWLAEFDYW

SEQ ID NO: 60893 - protein, 15 aa, Homo sapiens
CARDPTGNGWHFDYW

SEQ ID NO: 60894 - protein, 18 aa, Homo sapiens
CAKDINVVVVAAPLFDYW

SEQ ID NO: 60895 - protein, 18 aa, Homo sapiens
CAKFGGWYAYDDYYFDYW

SEQ ID NO: 60896 - protein, 23 aa, Homo sapiens
CARATSYDTLTGYFTGFDAFDFW

SEQ ID NO: 60897 - protein, 15 aa, Homo sapiens
CAHRQRFPGSGFDYW

SEQ ID NO: 60898 - protein, 18 aa, Homo sapiens
CAKDAVFNYDTLVAFDIW

SEQ ID NO: 60899 - protein, 21 aa, Homo sapiens
CARHAPLWDVPAASNWYFDLW

SEQ ID NO: 60900 - protein, 17 aa, Homo sapiens
CAKDKIGVGATSPLDYW

SEQ ID NO: 60901 - protein, 22 aa, Homo sapiens
CARDQEGYDILTGYYADTFDYW

SEQ ID NO: 60902 - protein, 14 aa, Homo sapiens
CSRVPPRGPPGDYW

SEQ ID NO: 60903 - protein, 16 aa, Homo sapiens
CARGDDFDWLRGYDYW

SEQ ID NO: 60904 - protein, 23 aa, Homo sapiens
CARLRDYYGSSYFDYYYYGMDVW

SEQ ID NO: 60905 - protein, 13 aa, Homo sapiens
CAKTGWQLAYDYW

SEQ ID NO: 60906 - protein, 26 aa, Homo sapiens
CTTDLSLYCSSTSCHAWSFSDWFDPW

SEQ ID NO: 60907 - protein, 18 aa, Homo sapiens
CARKLSSGWYWTEGGDYW

SEQ ID NO: 60908 - protein, 23 aa, Homo sapiens
CAREVEGPFFPPGSLWFGVSDYW

SEQ ID NO: 60909 - protein, 23 aa, Homo sapiens
CARHAAYSSGWITTYDPYYFDYW

SEQ ID NO: 60910 - protein, 19 aa, Homo sapiens
CASLLWFGELFNEDAFDIW

SEQ ID NO: 60911 - protein, 22 aa, Homo sapiens
CARGSRGDYVWGSYRLVASDYW

SEQ ID NO: 60912 - protein, 23 aa, Homo sapiens
CAKGAPEDIVVVVAALEYYFDYW

SEQ ID NO: 60913 - protein, 22 aa, Homo sapiens
CAKHGDDYYDSSGYGWNWFDPW

SEQ ID NO: 60914 - protein, 18 aa, Homo sapiens
CARDGTAMAWDYWYFDLW

SEQ ID NO: 60915 - protein, 18 aa, Homo sapiens
CAREITVIDYYYYGMDVW

SEQ ID NO: 60916 - protein, 15 aa, Homo sapiens
CAREEEQQANWFDPW

SEQ ID NO: 60917 - protein, 17 aa, Homo sapiens
CARYFDWSYSSYYFDYW

SEQ ID NO: 60918 - protein, 18 aa, Homo sapiens
CARELSGCGGDCSYFDYW

SEQ ID NO: 60919 - protein, 18 aa, Homo sapiens
CARHESSGWYHEGRFDYW

SEQ ID NO: 60920 - protein, 16 aa, Homo sapiens
CAREGSSGWTDYFDYW

SEQ ID NO: 60921 - protein, 29 aa, Homo sapiens
CAKDRLYYDILTGYSSPPGQYYYYGMDVW

SEQ ID NO: 60922 - protein, 21 aa, Homo sapiens
CARTDNRGYSYGYIMRWFDPW

SEQ ID NO: 60923 - protein, 22 aa, Homo sapiens
CTRTLWGGALVATKGVYYFDYW

SEQ ID NO: 60924 - protein, 21 aa, Homo sapiens
CARRAAALLWFGEQWNWFDPW

SEQ ID NO: 60925 - protein, 16 aa, Homo sapiens
CAKAPWGWLQLGFDYW

SEQ ID NO: 60926 - protein, 23 aa, Homo sapiens
CARHFGGYCSGGSCYSGSYFDYW

SEQ ID NO: 60927 - protein, 17 aa, Homo sapiens
CARVRNRYSGYDGADYW

SEQ ID NO: 60928 - protein, 19 aa, Homo sapiens
CARFPTYYDILTGYYRDYW

SEQ ID NO: 60929 - protein, 16 aa, Homo sapiens
CARSYNANWWGYFDLW

SEQ ID NO: 60930 - protein, 15 aa, Homo sapiens
CARSVFESYYYLDFW

SEQ ID NO: 60931 - protein, 17 aa, Homo sapiens
CARPARGGAGAGPFDIW

SEQ ID NO: 60932 - protein, 18 aa, Homo sapiens
CARGDPYYTLGPEAFDIW

SEQ ID NO: 60933 - protein, 17 aa, Homo sapiens
CAKEPHALTGYSPFDFW

SEQ ID NO: 60934 - protein, 24 aa, Homo sapiens
CARHLLHRYDYGDYGDSTVGFDPW

SEQ ID NO: 60935 - protein, 17 aa, Homo sapiens
CARQGEAVAGKYYFDNW

SEQ ID NO: 60936 - protein, 19 aa, Homo sapiens
CLRSSGWYLGTGLNAFDIW

SEQ ID NO: 60937 - protein, 17 aa, Homo sapiens
CARRSRSGSEAGGFDSW

SEQ ID NO: 60938 - protein, 17 aa, Homo sapiens
CARESEGAGYSREFDYW

SEQ ID NO: 60939 - protein, 21 aa, Homo sapiens
CARSWVGLLWFGELLRRFDPW

SEQ ID NO: 60940 - protein, 28 aa, Homo sapiens
CARWGLTEGITMVRGATSPSYYYGMDVW

SEQ ID NO: 60941 - protein, 16 aa, Homo sapiens
CAKDRREFQTFPFDYW

SEQ ID NO: 60942 - protein, 16 aa, Homo sapiens
CAKAEWELLGNWFDPW

SEQ ID NO: 60943 - protein, 20 aa, Homo sapiens
CARHQDYIRGNYRPSAFDIW

SEQ ID NO: 60944 - protein, 16 aa, Homo sapiens
CAKSRSSGWFDWFDAW

SEQ ID NO: 60945 - protein, 18 aa, Homo sapiens
CAREGGIVVVVANYFDYW

SEQ ID NO: 60946 - protein, 18 aa, Homo sapiens
CLKQDSDYAYYQDGMDVW

SEQ ID NO: 60947 - protein, 23 aa, Homo sapiens
CAREEMATIYFMSPYYYYGMDVW

SEQ ID NO: 60948 - protein, 20 aa, Homo sapiens
CARFFPYYYDSSGYYYFDQW

SEQ ID NO: 60949 - protein, 25 aa, Homo sapiens
CARTTRGYFDWLFHGDYYYYGMDVW

SEQ ID NO: 60950 - protein, 20 aa, Homo sapiens
CAKLYYDYVWGSFGDAFDIW

SEQ ID NO: 60951 - protein, 21 aa, Homo sapiens
CARTQYQLLLSGNYYYGMDVW

SEQ ID NO: 60952 - protein, 24 aa, Homo sapiens
CARDGAPFWLWFGEDRVGGAFGIW

SEQ ID NO: 60953 - protein, 16 aa, Homo sapiens
CARIPVGLAAAAADYW

SEQ ID NO: 60954 - protein, 25 aa, Homo sapiens
CARDRAYGSGSYYNGDYYYYGMDVW

SEQ ID NO: 60955 - protein, 22 aa, Homo sapiens
CARDLPQYYYDSSGYHAVFDYW

SEQ ID NO: 60956 - protein, 19 aa, Homo sapiens
CAKVGTVGPTTLLRHFDYW

SEQ ID NO: 60957 - protein, 15 aa, Homo sapiens
CARMLGDHGDAFDFW

SEQ ID NO: 60958 - protein, 26 aa, Homo sapiens
CARDERFGSSSWPPTLAYYYYGMDVW

SEQ ID NO: 60959 - protein, 23 aa, Homo sapiens
CARDLGSGWYGGEAYYYYGMDVW

SEQ ID NO: 60960 - protein, 21 aa, Homo sapiens
CARLPIRGYSGNGPVGYFDNW

SEQ ID NO: 60961 - protein, 19 aa, Homo sapiens
CAKMYGYWGSRRLFYFDYW

SEQ ID NO: 60962 - protein, 13 aa, Homo sapiens
CTKPGDSGWDDYW

SEQ ID NO: 60963 - protein, 21 aa, Homo sapiens
CAKGEWYYYGSGSSEDGADYW

SEQ ID NO: 60964 - protein, 21 aa, Homo sapiens
CAREPSPTYSSSWWDWYFDLW

SEQ ID NO: 60965 - protein, 14 aa, Homo sapiens
CARLWFGESDFDYW

SEQ ID NO: 60966 - protein, 17 aa, Homo sapiens
CATSLYIGEWEAAFDYW

SEQ ID NO: 60967 - protein, 24 aa, Homo sapiens
CARGGQYQLLFLGSSSWYAPFDYW

SEQ ID NO: 60968 - protein, 16 aa, Homo sapiens
CARIDNYYGSGSEDYW

SEQ ID NO: 60969 - protein, 22 aa, Homo sapiens
CAREGYCSGGTCYDGDNYFDYW

SEQ ID NO: 60970 - protein, 14 aa, Homo sapiens
CVREVTGGYYFDYW

SEQ ID NO: 60971 - protein, 15 aa, Homo sapiens
CARIRAAAGLGADYW

SEQ ID NO: 60972 - protein, 14 aa, Homo sapiens
CAKEGVLDWYLDLW

SEQ ID NO: 60973 - protein, 22 aa, Homo sapiens
CAGTQYSSGWYSLGYYYGMDVW

SEQ ID NO: 60974 - protein, 17 aa, Homo sapiens
CAVARDNYDILTPMDYW

SEQ ID NO: 60975 - protein, 21 aa, Homo sapiens
CARGIPRGLSGGPTSYAFDYW

SEQ ID NO: 60976 - protein, 19 aa, Homo sapiens
CASDRNYYDSSGLGPFDYW

SEQ ID NO: 60977 - protein, 14 aa, Homo sapiens
CATPTHYPPYFDYW

SEQ ID NO: 60978 - protein, 17 aa, Homo sapiens
CARGGHTPYHTGEFDYW

SEQ ID NO: 60979 - protein, 17 aa, Homo sapiens
CASILWYSSGWYYFDYW

SEQ ID NO: 60980 - protein, 15 aa, Homo sapiens
CTSPAIAAAADFDFW

SEQ ID NO: 60981 - protein, 23 aa, Homo sapiens
CAKEDSEASLLWFGELLGVLDYW

SEQ ID NO: 60982 - protein, 15 aa, Homo sapiens
CARDEWGGSVVFHYW

SEQ ID NO: 60983 - protein, 18 aa, Homo sapiens
CAREDQDFGDYEGGFDYW

SEQ ID NO: 60984 - protein, 17 aa, Homo sapiens
CATELVVVPARDAFDIW

SEQ ID NO: 60985 - protein, 16 aa, Homo sapiens
CARDEGYIKNFRFDYW

SEQ ID NO: 60986 - protein, 12 aa, Homo sapiens
CARAVGAEFDIW

SEQ ID NO: 60987 - protein, 25 aa, Homo sapiens
CAKDALYYYDSSGYYYGAGDYFDYW

SEQ ID NO: 60988 - protein, 22 aa, Homo sapiens
CARHPPRAWFGEWNKVGWFDPW

SEQ ID NO: 60989 - protein, 29 aa, Homo sapiens
CARDFFSRGDNGSGSSTGPYYYYYGMDVW

SEQ ID NO: 60990 - protein, 15 aa, Homo sapiens
CATFTVTTARLVDYW

SEQ ID NO: 60991 - protein, 19 aa, Homo sapiens
CARQSRGQWLVHEGYFDYW

SEQ ID NO: 60992 - protein, 20 aa, Homo sapiens
CATNVQVEDYGDYGFAFDIW

SEQ ID NO: 60993 - protein, 15 aa, Homo sapiens
CAKDKDTAMGESDYW

SEQ ID NO: 60994 - protein, 19 aa, Homo sapiens
CAAVGSPWIITRFGAFDIW

SEQ ID NO: 60995 - protein, 19 aa, Homo sapiens
CARGRGYSGYGSNWYFDLW

SEQ ID NO: 60996 - protein, 20 aa, Homo sapiens
CAKGGWYYYDSSGYQTFDYW

SEQ ID NO: 60997 - protein, 16 aa, Homo sapiens
CAKSSVGARSVGGDYW

SEQ ID NO: 60998 - protein, 14 aa, Homo sapiens
CARIFEGGSGFDTW

SEQ ID NO: 60999 - protein, 18 aa, Homo sapiens
CAKDIGYGSGTLFYFDSW

SEQ ID NO: 61000 - protein, 12 aa, Homo sapiens
CARANLGIEDYW

SEQ ID NO: 61001 - protein, 24 aa, Homo sapiens
CARTLYGETKRGYGYYYYYGMDVW

SEQ ID NO: 61002 - protein, 18 aa, Homo sapiens
CAKDSTGGYDFSDQFDPW

SEQ ID NO: 61003 - protein, 20 aa, Homo sapiens
CAKDGSLPPYYYDSGVPDYW

SEQ ID NO: 61004 - protein, 16 aa, Homo sapiens
CQTSLTMIQLDAFDIW

SEQ ID NO: 61005 - protein, 23 aa, Homo sapiens
CAKEIFPPLRYFDWLLPPPLDYW

SEQ ID NO: 61006 - protein, 14 aa, Homo sapiens
CARTYQPLLPYDYW

SEQ ID NO: 61007 - protein, 20 aa, Homo sapiens
CARDLYCSGGSCYSVGFDPW

SEQ ID NO: 61008 - protein, 22 aa, Homo sapiens
CAKVGGGAYCGGDCYRGYFDYW

SEQ ID NO: 61009 - protein, 23 aa, Homo sapiens
CARESRQRWLQLLHYYYYGMDVW

SEQ ID NO: 61010 - protein, 21 aa, Homo sapiens
CTTDLELYYDILTGYYRIDYW

SEQ ID NO: 61011 - protein, 17 aa, Homo sapiens
CANSRSGYNLGLYFDYW

SEQ ID NO: 61012 - protein, 19 aa, Homo sapiens
CAKDTSRQWELLRDGMDVW

SEQ ID NO: 61013 - protein, 16 aa, Homo sapiens
CANAGSSGWTSAFDYW

SEQ ID NO: 61014 - protein, 23 aa, Homo sapiens
CARDLIAAAVQGDYYYYYGMDVW

SEQ ID NO: 61015 - protein, 12 aa, Homo sapiens
CARYSGYEFAYW

SEQ ID NO: 61016 - protein, 18 aa, Homo sapiens
CARERGGDNWNDGWFDPW

SEQ ID NO: 61017 - protein, 19 aa, Homo sapiens
CARVALRGYSYYYYGMDVW

SEQ ID NO: 61018 - protein, 21 aa, Homo sapiens
CARDLASSGWYSFTPNAFDIW

SEQ ID NO: 61019 - protein, 28 aa, Homo sapiens
CAKDGLRYFDWLLLAETSNYYYYGMDVW

SEQ ID NO: 61020 - protein, 11 aa, Homo sapiens [sequence omitted]

SEQ ID NO: 61021 - protein, 18 aa, Homo sapiens
CARPVHVVVAYHWYFGLW

SEQ ID NO: 61022 - protein, 19 aa, Homo sapiens
CARRDSSGRYKISDAFDIW

SEQ ID NO: 61023 - protein, 21 aa, Homo sapiens
CARSPSRSVSSYFYIYAMDVW

SEQ ID NO: 61024 - protein, 20 aa, Homo sapiens
CHAYCCGGSCSGATGTFDYW

SEQ ID NO: 61025 - protein, 22 aa, Homo sapiens
CAKDRSALWFGRWDTEDGMDVW

SEQ ID NO: 61026 - protein, 15 aa, Homo sapiens
CARDWSGSDHQFDYW

SEQ ID NO: 61027 - protein, 21 aa, Homo sapiens
CARVVRGVMRGNYYYYGMDVW

SEQ ID NO: 61028 - protein, 18 aa, Homo sapiens
CAKAWSRTGGYVDAFDIW

SEQ ID NO: 61029 - protein, 21 aa, Homo sapiens
CAKDLSTYSSGWYTGYLFDYW

SEQ ID NO: 61030 - protein, 17 aa, Homo sapiens
CARHLKQWLSTGAFDIW

SEQ ID NO: 61031 - protein, 16 aa, Homo sapiens
CATLHCGGDCSNFDYW

SEQ ID NO: 61032 - protein, 23 aa, Homo sapiens
CARGQPELRYFDWLLYGGAFDIW

SEQ ID NO: 61033 - protein, 22 aa, Homo sapiens
CARDGAGYCSGGQCPQGWFHPW

SEQ ID NO: 61034 - protein, 23 aa, Homo sapiens
CAHTPAPYYDILTGYSWWGFDYW

SEQ ID NO: 61035 - protein, 25 aa, Homo sapiens
CARDHFNMVRGVTVEGYPYYGMDVW

SEQ ID NO: 61036 - protein, 23 aa, Homo sapiens
CARDWRDIVATIYSPGSPYFDYW

SEQ ID NO: 61037 - protein, 26 aa, Homo sapiens
CARGYWGRGGSCYSDSVCYYYGMDVW

SEQ ID NO: 61038 - protein, 13 aa, Homo sapiens
CARGPYMSKCDYW

SEQ ID NO: 61039 - protein, 20 aa, Homo sapiens
CARDPSYSFGEFSRYYFDYW

SEQ ID NO: 61040 - protein, 17 aa, Homo sapiens
CAKDTTGDGLSWGFDYW

SEQ ID NO: 61041 - protein, 26 aa, Homo sapiens
CAHQIRAVAAAGHENYYYYYYGMDVW

SEQ ID NO: 61042 - protein, 17 aa, Homo sapiens
CARDLTGYNSGWYYDYW

SEQ ID NO: 61043 - protein, 18 aa, Homo sapiens
CATDSSGYDLSTRWFDPW

SEQ ID NO: 61044 - protein, 28 aa, Homo sapiens
CARDLDYYGSGSYYNPHTYYYYYGMDVW

SEQ ID NO: 61045 - protein, 19 aa, Homo sapiens
CANLGFFYYDSSGSPFDYW

SEQ ID NO: 61046 - protein, 14 aa, Homo sapiens
CARSKINYGDLDYW

SEQ ID NO: 61047 - protein, 22 aa, Homo sapiens
CAKQGGRYCSGGSCYSGYFDYW

SEQ ID NO: 61048 - protein, 22 aa, Homo sapiens
CARETVMWVRHMTYYYYGMDVW

SEQ ID NO: 61049 - protein, 14 aa, Homo sapiens
CQVWDTSSHHEEVF

SEQ ID NO: 61050 - protein, 17 aa, Homo sapiens
CAKDPTTDTAMAYPDYW

SEQ ID NO: 61051 - protein, 28 aa, Homo sapiens
CARDVFVVGTRDGYNLAHYYYYYGMDVW

SEQ ID NO: 61052 - protein, 13 aa, Homo sapiens
CARSYGGAHLDYW

SEQ ID NO: 61053 - protein, 18 aa, Homo sapiens
CAKGWDYTSGSPREIDYW

SEQ ID NO: 61054 - protein, 21 aa, Homo sapiens
CARQRTYCSGGICHQDGMDVW

SEQ ID NO: 61055 - protein, 21 aa, Homo sapiens
CARDLRRSGSYYYFHDAFDLW

SEQ ID NO: 61056 - protein, 19 aa, Homo sapiens
CARDGPNRGYTGEEGLDYW

SEQ ID NO: 61057 - protein, 23 aa, Homo sapiens
CARDPISIAAAFGARPYNWFDPW

SEQ ID NO: 61058 - protein, 12 aa, Homo sapiens
CAKDHGGYYSYW

SEQ ID NO: 61059 - protein, 19 aa, Homo sapiens
CAKNEGYSSGWSFGAFDIW

SEQ ID NO: 61060 - protein, 17 aa, Homo sapiens
CAHRLPNKNWGSFFDFW

SEQ ID NO: 61061 - protein, 19 aa, Homo sapiens
CAREGITMVRGVRSWFDPW

SEQ ID NO: 61062 - protein, 24 aa, Homo sapiens
CARDQPHWTMVQEIYYYYYGMDVW

SEQ ID NO: 61063 - protein, 14 aa, Homo sapiens
CVTNFYGSYTFDNW

SEQ ID NO: 61064 - protein, 13 aa, Homo sapiens
CARKNRLRWPDYW

SEQ ID NO: 61065 - protein, 18 aa, Homo sapiens
CARVRRWFGKIEYAFDVW

SEQ ID NO: 61066 - protein, 16 aa, Homo sapiens
CARRAQWLRLEWFDPW

SEQ ID NO: 61067 - protein, 18 aa, Homo sapiens
CASQPYCGGDCFGAFDIW

SEQ ID NO: 61068 - protein, 16 aa, Homo sapiens
CAKGSGYSGYEEVDYW

SEQ ID NO: 61069 - protein, 14 aa, Homo sapiens
CAREGSLLYYFNDW

SEQ ID NO: 61070 - protein, 12 aa, Homo sapiens
CAKQVPYSLDYW

SEQ ID NO: 61071 - protein, 17 aa, Homo sapiens
CALVGYGITMIVGNDYW

SEQ ID NO: 61072 - protein, 24 aa, Homo sapiens
CARPQVYSSGWYGRGGYYYGMDVW

SEQ ID NO: 61073 - protein, 19 aa, Homo sapiens
CARMQGGYSYEVGGSFDYW

SEQ ID NO: 61074 - protein, 22 aa, Homo sapiens
CARHGGRSWYSSGWYPVDFDYW

SEQ ID NO: 61075 - protein, 16 aa, Homo sapiens
CARHQDSSAHQGFDHW

SEQ ID NO: 61076 - protein, 20 aa, Homo sapiens
CARAAAWGMIVVVIDAFDIW

SEQ ID NO: 61077 - protein, 23 aa, Homo sapiens
CAKVSKESNVMLRGVIEGDFDYW

SEQ ID NO: 61078 - protein, 17 aa, Homo sapiens
CARHRVEKATVTPFDFW

SEQ ID NO: 61079 - protein, 16 aa, Homo sapiens
CARIQLWLVLGAFDIW

SEQ ID NO: 61080 - protein, 21 aa, Homo sapiens
CTRDLYEGDIWFGDVQPFDYW

SEQ ID NO: 61081 - protein, 18 aa, Homo sapiens
CAKAAISWGSSLEYFQHW

SEQ ID NO: 61082 - protein, 23 aa, Homo sapiens
CARDELYYDILTGYATVLYFQHW

SEQ ID NO: 61083 - protein, 17 aa, Homo sapiens
CASDRGVWGSYSPFDYW

SEQ ID NO: 61084 - protein, 13 aa, Homo sapiens
CQSVDTSGIEVLF

SEQ ID NO: 61085 - protein, 20 aa, Homo sapiens
CAKTLLDYYDSSGYGAFDIW

SEQ ID NO: 61086 - protein, 20 aa, Homo sapiens
CAKELAVTFENYYYYGMDVW

SEQ ID NO: 61087 - protein, 23 aa, Homo sapiens
CARVLRYFDWFTSSTLNNWFDPW

SEQ ID NO: 61088 - protein, 16 aa, Homo sapiens
CAKDREGYSYGGIDYW

SEQ ID NO: 61089 - protein, 16 aa, Homo sapiens
CARGPGVRGEGILDYW

SEQ ID NO: 61090 - protein, 11 aa, Homo sapiens
CQQYQAYSLTF

SEQ ID NO: 61091 - protein, 15 aa, Homo sapiens
CVRVSNSGWPYYDLW

SEQ ID NO: 61092 - protein, 25 aa, Homo sapiens
CAREYRSVGRHNWNDVGYYYGMDVW

SEQ ID NO: 61093 - protein, 22 aa, Homo sapiens
CARGRCFSGWSHLRCSNWFDPW

SEQ ID NO: 61094 - protein, 24 aa, Homo sapiens
CARSDPPYYYDSSGYYNSLNLDYW

SEQ ID NO: 61095 - protein, 15 aa, Homo sapiens
CARRVGNYGFYFDTW

SEQ ID NO: 61096 - protein, 16 aa, Homo sapiens
CARDFRFGESDWGDYW

SEQ ID NO: 61097 - protein, 23 aa, Homo sapiens
CARRIGGYYCSSTSCYLYAFDIW

SEQ ID NO: 61098 - protein, 16 aa, Homo sapiens
CASKASGSYLGSFDYW

SEQ ID NO: 61099 - protein, 22 aa, Homo sapiens
CAKDLPYYFDSSDYGGGYFDSW

SEQ ID NO: 61100 - protein, 21 aa, Homo sapiens
CARHVKGTVATRGRSHWFDTW

SEQ ID NO: 61101 - protein, 19 aa, Homo sapiens
CAKDLVLLWFGTNAAFDIW

SEQ ID NO: 61102 - protein, 25 aa, Homo sapiens
CARGTVYYYDSSGYPVDKNDAFDIW

SEQ ID NO: 61103 - protein, 22 aa, Homo sapiens
CARDPTTVTTHDYYYYYGMDVW

SEQ ID NO: 61104 - protein, 17 aa, Homo sapiens
CARQTPSYYGSGSYDYW

SEQ ID NO: 61105 - protein, 25 aa, Homo sapiens
CARASPRYFDWLLHAGVYYYGMDVW

SEQ ID NO: 61106 - protein, 18 aa, Homo sapiens
CARDGSDYYDSSGYLDYW

SEQ ID NO: 61107 - protein, 16 aa, Homo sapiens
CARERGGQWRDGMDVW

SEQ ID NO: 61108 - protein, 21 aa, Homo sapiens
CATSFMITFGGVIVDDAFDIW

SEQ ID NO: 61109 - protein, 17 aa, Homo sapiens
CASTIAAAGIHLFFDYW

SEQ ID NO: 61110 - protein, 15 aa, Homo sapiens
CARALYTSSWYADYW

SEQ ID NO: 61111 - protein, 16 aa, Homo sapiens
CAREDTGTYYSYFDSW

SEQ ID NO: 61112 - protein, 19 aa, Homo sapiens
CAREGYYGRGFYYYGMDVW

SEQ ID NO: 61113 - protein, 13 aa, Homo sapiens
CARAPTGEYIDFW

SEQ ID NO: 61114 - protein, 19 aa, Homo sapiens
CAKRWGYDILTGDDAFDIW

SEQ ID NO: 61115 - protein, 17 aa, Homo sapiens
CAKVPYYYGSAPASDYW

SEQ ID NO: 61116 - protein, 15 aa, Homo sapiens
CAHRKFGGWGAFDPW

SEQ ID NO: 61117 - protein, 27 aa, Homo sapiens
CARVEIRLFYDYVWGSYRFSHDAFDIW

SEQ ID NO: 61118 - protein, 24 aa, Homo sapiens
CARESGPNYDILTGYYRSGAFDIW

SEQ ID NO: 61119 - protein, 18 aa, Homo sapiens
CARLLKQQLVTEVAFDPW

SEQ ID NO: 61120 - protein, 24 aa, Homo sapiens
CARDLDYYGSGSYDAPYYYGMDVW

SEQ ID NO: 61121 - protein, 18 aa, Homo sapiens
CARDIGDTAMESDAFDIW

SEQ ID NO: 61122 - protein, 24 aa, Homo sapiens
CARIWSYGSGSYYRGNGQDAFDIW

SEQ ID NO: 61123 - protein, 16 aa, Homo sapiens
CARGGYSHTYGYFQHW

SEQ ID NO: 61124 - protein, 15 aa, Homo sapiens
CARLSSSLTWYFDLW

SEQ ID NO: 61125 - protein, 21 aa, Homo sapiens
CARDQGINTDYGDYVGAFDIW

SEQ ID NO: 61126 - protein, 24 aa, Homo sapiens
CARHVTGSGSWITPYYYYYGMDVW

SEQ ID NO: 61127 - protein, 14 aa, Homo sapiens
CAREVGPRGAFDIW

SEQ ID NO: 61128 - protein, 29 aa, Homo sapiens
CARGEERPQGWEVVVIAMGGAYYYGMDVW

SEQ ID NO: 61129 - protein, 24 aa, Homo sapiens
CARITVVTTPLYDDYYYYYGMDVW

SEQ ID NO: 61130 - protein, 18 aa, Homo sapiens
CARDHFGFDVVITPFDYW

SEQ ID NO: 61131 - protein, 15 aa, Homo sapiens
CVRRGEMSGINFDNW

SEQ ID NO: 61132 - protein, 19 aa, Homo sapiens
CARGMVVVPAATINWFDPW

SEQ ID NO: 61133 - protein, 21 aa, Homo sapiens
CARSTSYGSGSYPQYYGMDVW

SEQ ID NO: 61134 - protein, 28 aa, Homo sapiens
CARDVLRLDPIVGALVQTVYYYYGMDVW

SEQ ID NO: 61135 - protein, 17 aa, Homo sapiens
CAKDESDYGDPTPFDYW

SEQ ID NO: 61136 - protein, 19 aa, Homo sapiens
CARELIQLWPRIYWYFDLW

SEQ ID NO: 61137 - protein, 19 aa, Homo sapiens
CAHSRDSSSWFTNWYFDLW

SEQ ID NO: 61138 - protein, 17 aa, Homo sapiens
CAKEVRGVIISPFFDYW

SEQ ID NO: 61139 - protein, 20 aa, Homo sapiens
CAKWGNYYYDSSGSGPEDYW

SEQ ID NO: 61140 - protein, 23 aa, Homo sapiens
CAREYSGYDFIGGFYYYYGMDVW

SEQ ID NO: 61141 - protein, 19 aa, Homo sapiens
CATDNYVWGSYRSYYFDYW

SEQ ID NO: 61142 - protein, 22 aa, Homo sapiens
CARGAENSDSGTYYKEGYFQRW

SEQ ID NO: 61143 - protein, 19 aa, Homo sapiens
CARSLARYSSGWYYYFDYW

SEQ ID NO: 61144 - protein, 17 aa, Homo sapiens
CATGGGLWFGELTLDYW

SEQ ID NO: 61145 - protein, 21 aa, Homo sapiens
CANLNYYDSSGHEADDAFDIW

SEQ ID NO: 61146 - protein, 23 aa, Homo sapiens
CATDSLGVGFGDFNYYYYGMDVW

SEQ ID NO: 61147 - protein, 22 aa, Homo sapiens
CARDLVGITMVRGVINNTFDYW

SEQ ID NO: 61148 - protein, 22 aa, Homo sapiens
CVAVVVVAASRGIYYYYGMDVW

SEQ ID NO: 61149 - protein, 17 aa, Homo sapiens
CAYIAPIGPGMNWLDPW

SEQ ID NO: 61150 - protein, 16 aa, Homo sapiens
CALSGYSSSWSAFDIW

SEQ ID NO: 61151 - protein, 20 aa, Homo sapiens
CARARYSSSWYYGTGWFDPW

SEQ ID NO: 61152 - protein, 21 aa, Homo sapiens
CARDVGDSSGYYSGPYWFDPW

SEQ ID NO: 61153 - protein, 18 aa, Homo sapiens
CANFFGQYYVSQTPFQYW

SEQ ID NO: 61154 - protein, 15 aa, Homo sapiens
CAKGASGWENNFDYW

SEQ ID NO: 61155 - protein, 18 aa, Homo sapiens
CARERRGLRWYNDAFDIW

SEQ ID NO: 61156 - protein, 24 aa, Homo sapiens
CARGGWVSGGSGSYGPRFSLFDYW

SEQ ID NO: 61157 - protein, 14 aa, Homo sapiens
CAKLGTFGREWDYW

SEQ ID NO: 61158 - protein, 16 aa, Homo sapiens
CQQYGSSPPGRLIYTF

SEQ ID NO: 61159 - protein, 24 aa, Homo sapiens
CARERYSSSWYKFNGINYNWFDPW

SEQ ID NO: 61160 - protein, 26 aa, Homo sapiens
CAHRVDISFLRGVEEPGLTRSSFDFW

SEQ ID NO: 61161 - protein, 20 aa, Homo sapiens
CARGGVAVAGSDSPEYLQHW

SEQ ID NO: 61162 - protein, 15 aa, Homo sapiens
CAREEGSSGGAFDYW

SEQ ID NO: 61163 - protein, 20 aa, Homo sapiens
CAKDRGTSPDPSTGNWFDPW

SEQ ID NO: 61164 - protein, 26 aa, Homo sapiens
CAKSGQTAGILLWFHYSDAGDYFDYW

SEQ ID NO: 61165 - protein, 18 aa, Homo sapiens
CAKGTDPYVPYYYGMDVW

SEQ ID NO: 61166 - protein, 23 aa, Homo sapiens
CATLSPYDSSGYYREKYNWFDPW

SEQ ID NO: 61167 - protein, 24 aa, Homo sapiens
CATGEGHSLSYSGSRVYPTSFDYW

SEQ ID NO: 61168 - protein, 23 aa, Homo sapiens
CARAQQNYYYDNDRSYMGPFDIW

SEQ ID NO: 61169 - protein, 19 aa, Homo sapiens
CAHRPSGLFRVGATFFDYW

SEQ ID NO: 61170 - protein, 22 aa, Homo sapiens
CAREVVERRCSGNSCYPYFDFW

SEQ ID NO: 61171 - protein, 18 aa, Homo sapiens
CARAIPMVRGVIRWFDPW

SEQ ID NO: 61172 - protein, 23 aa, Homo sapiens
CARRSYYDSSGYYWPGRAPFDYW

SEQ ID NO: 61173 - protein, 15 aa, Homo sapiens
CARMSWSSGWYVDYW

SEQ ID NO: 61174 - protein, 16 aa, Homo sapiens
CAAERGRFFEYYFDYW

SEQ ID NO: 61175 - protein, 16 aa, Homo sapiens
CARSLLWFGDGWFDPW

SEQ ID NO: 61176 - protein, 16 aa, Homo sapiens
CAKGGKDVYNVYFDNW

SEQ ID NO: 61177 - protein, 20 aa, Homo sapiens
CAKDGAWYSSGWYSPHIDYW

SEQ ID NO: 61178 - protein, 17 aa, Homo sapiens
CANIWLWDWDSQGFDMW

SEQ ID NO: 61179 - protein, 19 aa, Homo sapiens
CARSQYDILTGQTETFDYW

SEQ ID NO: 61180 - protein, 13 aa, Homo sapiens
CASGGWQLWFGYW

SEQ ID NO: 61181 - protein, 21 aa, Homo sapiens
CAKDTLELAITFGGVTQPDYW

SEQ ID NO: 61182 - protein, 18 aa, Homo sapiens
CARDVPVATSPYDAFDIW

SEQ ID NO: 61183 - protein, 12 aa, Homo sapiens
CQHFGSSPLYAF

SEQ ID NO: 61184 - protein, 21 aa, Homo sapiens
CARDLGVQDYYDSLKDAFDIW

SEQ ID NO: 61185 - protein, 15 aa, Homo sapiens
CARGQQLAPDAFDIW

SEQ ID NO: 61186 - protein, 13 aa, Homo sapiens
CARVGFGEDFDLW

SEQ ID NO: 61187 - protein, 12 aa, Homo sapiens
CVRDLGWYDDCW

SEQ ID NO: 61188 - protein, 18 aa, Homo sapiens
CAKDRSGISTMVTTFDYW

SEQ ID NO: 61189 - protein, 27 aa, Homo sapiens
CAKDRLDRDLLRLLWFGELLGDAFDIW

SEQ ID NO: 61190 - protein, 27 aa, Homo sapiens
CAKDWAEYCSSTSCTGGYYYYYGMDVW

SEQ ID NO: 61191 - protein, 18 aa, Homo sapiens
CAKDLYIYHTFMNYFDYW

SEQ ID NO: 61192 - protein, 25 aa, Homo sapiens
CARDVEGAVSGLPTRRYYYYGMGVW

SEQ ID NO: 61193 - protein, 19 aa, Homo sapiens
CARDRLSGSMFANDAFDIW

SEQ ID NO: 61194 - protein, 24 aa, Homo sapiens
CARRVVAHGDYNLYYYYYYGMDVW

SEQ ID NO: 61195 - protein, 20 aa, Homo sapiens
CARRESHWVTGTRAEYFQHW

SEQ ID NO: 61196 - protein, 21 aa, Homo sapiens
CAKDFGYGGSGSFIAFAFDIW

SEQ ID NO: 61197 - protein, 21 aa, Homo sapiens
CVRDPRGSGSYYNIFDYLDYW

SEQ ID NO: 61198 - protein, 20 aa, Homo sapiens
CAREGPGPSGRSSVCTFDVW

SEQ ID NO: 61199 - protein, 19 aa, Homo sapiens
CTRADCIDCYYLYYYFDYW

SEQ ID NO: 61200 - protein, 22 aa, Homo sapiens
CAKETRHDDIWGTYRHDAFDIW

SEQ ID NO: 61201 - protein, 19 aa, Homo sapiens
CARRRTSSSWYQTDAFDIW

SEQ ID NO: 61202 - protein, 23 aa, Homo sapiens
CARAASWSLVRGVMRYYYGMDVW

SEQ ID NO: 61203 - protein, 23 aa, Homo sapiens
CAKRGGTYYDILTGYYSYYFDYW

SEQ ID NO: 61204 - protein, 15 aa, Homo sapiens
CAREGPTVTNEIDYW

SEQ ID NO: 61205 - protein, 21 aa, Homo sapiens
CARGTLYYDSSGYYYDWFDPW

SEQ ID NO: 61206 - protein, 17 aa, Homo sapiens
CVRGYDLLTGLDAFDMW

SEQ ID NO: 61207 - protein, 24 aa, Homo sapiens
CARTASRPWSSSWYERRHYYFDYW

SEQ ID NO: 61208 - protein, 18 aa, Homo sapiens
CAREETVTTFEPDAFDIW

SEQ ID NO: 61209 - protein, 13 aa, Homo sapiens
CQQSYTFPDGLTF

SEQ ID NO: 61210 - protein, 22 aa, Homo sapiens
CARESWGYYDSSGYYHDAFDIW

SEQ ID NO: 61211 - protein, 22 aa, Homo sapiens
CAKDIAITMVRGVTAEDGMDVW

SEQ ID NO: 61212 - protein, 19 aa, Homo sapiens
CARRRMQRWLQFEYYFDYW

SEQ ID NO: 61213 - protein, 23 aa, Homo sapiens
CARDYFSVKPVAGTNYYYGMDVW

SEQ ID NO: 61214 - protein, 16 aa, Homo sapiens
CATSFAIIAAAGFDYW

SEQ ID NO: 61215 - protein, 17 aa, Homo sapiens
CARDRTDTAMVEPFDYW

SEQ ID NO: 61216 - protein, 26 aa, Homo sapiens
CAKGGGSYYLLVSTNNPASDFYFDYW

SEQ ID NO: 61217 - protein, 15 aa, Homo sapiens
CARGSGILAAPLDYW

SEQ ID NO: 61218 - protein, 22 aa, Homo sapiens
CARDRWGMYYYDSRGLDAFDIW

SEQ ID NO: 61219 - protein, 17 aa, Homo sapiens
CAQTSALSDDPYYFEYW

SEQ ID NO: 61220 - protein, 19 aa, Homo sapiens
CARTGYSSGWPPYNWFDPW

SEQ ID NO: 61221 - protein, 24 aa, Homo sapiens
CARDRRPLPYCSGGSCYRDGMDVW

SEQ ID NO: 61222 - protein, 23 aa, Homo sapiens
CARDWEAAAGTPWSGYYYGMDVW

SEQ ID NO: 61223 - protein, 15 aa, Homo sapiens
CAKDLFGIAATIDYW

SEQ ID NO: 61224 - protein, 14 aa, Homo sapiens
CARWEYSYGQVDYW

SEQ ID NO: 61225 - protein, 18 aa, Homo sapiens
CARYGYSSGYKGYYFDYW

SEQ ID NO: 61226 - protein, 19 aa, Homo sapiens
CARDSLASKGYYYYGLDVW

SEQ ID NO: 61227 - protein, 19 aa, Homo sapiens
CARAHYDNLAGYLDVFDIW

SEQ ID NO: 61228 - protein, 20 aa, Homo sapiens
CIGAIGGDCYLGLGCAPDYW

SEQ ID NO: 61229 - protein, 13 aa, Homo sapiens
CARFVPLTGIDYW

SEQ ID NO: 61230 - protein, 14 aa, Homo sapiens
CAKKGWPHDALDIW

SEQ ID NO: 61231 - protein, 18 aa, Homo sapiens
CARVGYSYGYLVPNFDYW

SEQ ID NO: 61232 - protein, 14 aa, Homo sapiens
CASGYNTRRPFDYW

SEQ ID NO: 61233 - protein, 26 aa, Homo sapiens
CAGLEEYYPASGKYSTVHQMFYFDAW

SEQ ID NO: 61234 - protein, 22 aa, Homo sapiens
CAREGWGSYARNNYYYYGMDVW

SEQ ID NO: 61235 - protein, 16 aa, Homo sapiens
CARDSITMVRGPFDYW

SEQ ID NO: 61236 - protein, 23 aa, Homo sapiens
CARDRREVQLWPPGYYYYGMDVW

SEQ ID NO: 61237 - protein, 23 aa, Homo sapiens
CARQCWTPDRGYSSHCHVAFDFW

SEQ ID NO: 61238 - protein, 25 aa, Homo sapiens
CARATVEYYYDSSGYGTGEYYFDYW

SEQ ID NO: 61239 - protein, 19 aa, Homo sapiens
CARASHGSGSYYIFGWDYW

SEQ ID NO: 61240 - protein, 23 aa, Homo sapiens
CARLDGDCSVRGCSPSGHWFDPW

SEQ ID NO: 61241 - protein, 31 aa, Homo sapiens
CAKDHYGRYYYDSSGYYEFPPPYYYYGMDVW

SEQ ID NO: 61242 - protein, 24 aa, Homo sapiens
CATDGDWRVGARRVSYYYYGMDVW

SEQ ID NO: 61243 - protein, 20 aa, Homo sapiens
CVRHVESSVLVSRVYYFDHW

SEQ ID NO: 61244 - protein, 23 aa, Homo sapiens
CARAGWVRGATTPYYYYYGMDVW

SEQ ID NO: 61245 - protein, 16 aa, Homo sapiens
CARFLEYGHYYGMDVW

SEQ ID NO: 61246 - protein, 25 aa, Homo sapiens
CARSLVGYYGSGSYSYYYYYGMDVW

SEQ ID NO: 61247 - protein, 16 aa, Homo sapiens
CANNRDGYSPDAFDIW

SEQ ID NO: 61248 - protein, 22 aa, Homo sapiens
CARAAMVRGVISSFVAPYFDYW

SEQ ID NO: 61249 - protein, 18 aa, Homo sapiens
CAKRLYSYAYIGGSLDYW

SEQ ID NO: 61250 - protein, 21 aa, Homo sapiens
CTTGRYYYDSSGYPNDAFDIW

SEQ ID NO: 61251 - protein, 16 aa, Homo sapiens
CAKDRWGGSPAHFDNW

SEQ ID NO: 61252 - protein, 21 aa, Homo sapiens
CAKEGRIAVADYSLREYLQHW

SEQ ID NO: 61253 - protein, 23 aa, Homo sapiens
CAKAAAGSLMFSGKIRIEYFQHW

SEQ ID NO: 61254 - protein, 17 aa, Homo sapiens
CAKDYHSSTWSGYFDSW

SEQ ID NO: 61255 - protein, 18 aa, Homo sapiens
CAKRGYSYGYWAGGLDYW

SEQ ID NO: 61256 - protein, 22 aa, Homo sapiens
CARGFAGIGSGWLPYYNWFDPW

SEQ ID NO: 61257 - protein, 15 aa, Homo sapiens
CARGNVGSWRAFDYW

SEQ ID NO: 61258 - protein, 20 aa, Homo sapiens
CARCSWRSPPKYYYYGMDVW

SEQ ID NO: 61259 - protein, 15 aa, Homo sapiens
CASTVAGTWGFFVYW

SEQ ID NO: 61260 - protein, 14 aa, Homo sapiens
CATLAGDYEDFDYW

SEQ ID NO: 61261 - protein, 13 aa, Homo sapiens
CARVSDTDALDIW

SEQ ID NO: 61262 - protein, 17 aa, Homo sapiens
CAKGYYDILTEAAFDIW

SEQ ID NO: 61263 - protein, 17 aa, Homo sapiens
CMQNLQTPPVTFGPVTF

SEQ ID NO: 61264 - protein, 21 aa, Homo sapiens
CARAGENDYVWGSYGDGMDVW

SEQ ID NO: 61265 - protein, 27 aa, Homo sapiens
CARASLYCSSTSCYGFGDYYDYYFDYW

SEQ ID NO: 61266 - protein, 16 aa, Homo sapiens
CAANYYDILTGYFRVW

SEQ ID NO: 61267 - protein, 18 aa, Homo sapiens
CAKVFYGDYGFSFAFDIW

SEQ ID NO: 61268 - protein, 20 aa, Homo sapiens
CTTDLFEYCSGGSCYPIDYW

SEQ ID NO: 61269 - protein, 19 aa, Homo sapiens
CAKDITMVRGDLDDAFDIW

SEQ ID NO: 61270 - protein, 24 aa, Homo sapiens
CARESALIDLIAVAGPAGIAFDIW

SEQ ID NO: 61271 - protein, 17 aa, Homo sapiens
CAKDTFERVIVNLLDYW

SEQ ID NO: 61272 - protein, 18 aa, Homo sapiens
CARDGVLEDSSSWTFDPW

SEQ ID NO: 61273 - protein, 19 aa, Homo sapiens
CARSPDRLVVAASYYFDYW

SEQ ID NO: 61274 - protein, 24 aa, Homo sapiens
CAKVPVCSGGSCYESYYYYGMDVW

SEQ ID NO: 61275 - protein, 24 aa, Homo sapiens
CARGKRYYDSWGWSIDSPNAFDIW

SEQ ID NO: 61276 - protein, 13 aa, Homo sapiens
CVRRNPIFGFDYW

SEQ ID NO: 61277 - protein, 18 aa, Homo sapiens
CAKDPGMYGQNDGAFDIW

SEQ ID NO: 61278 - protein, 23 aa, Homo sapiens
CARAAHYVWGSYRIYYYYGMDVW

SEQ ID NO: 61279 - protein, 16 aa, Homo sapiens
CARVSRIAVARWFDPW

SEQ ID NO: 61280 - protein, 12 aa, Homo sapiens
CQHYNNWVDRTF

SEQ ID NO: 61281 - protein, 22 aa, Homo sapiens
CATRGFNYDILTSLYYYGMDVW

SEQ ID NO: 61282 - protein, 18 aa, Homo sapiens
CARVGGGSYSVGSGIDYW

SEQ ID NO: 61283 - protein, 16 aa, Homo sapiens
CAGGSTSSRWDWFDPW

SEQ ID NO: 61284 - protein, 16 aa, Homo sapiens
CAKGAMATILIPFDYW

SEQ ID NO: 61285 - protein, 21 aa, Homo sapiens
CVKKAVGLCSGGNCYNWFDAW

SEQ ID NO: 61286 - protein, 18 aa, Homo sapiens
CASLGGYSGYDYKIIDYW

SEQ ID NO: 61287 - protein, 16 aa, Homo sapiens
CQQYNSYSPKGRGGTF

SEQ ID NO: 61288 - protein, 17 aa, Homo sapiens
CVRAYSGYDYGDAFHIW

SEQ ID NO: 61289 - protein, 20 aa, Homo sapiens
CARVTIGYQRYYYYYGMDVW

SEQ ID NO: 61290 - protein, 24 aa, Homo sapiens
CARGFWRYGGNSVLYYYYYGMDVW

SEQ ID NO: 61291 - protein, 26 aa, Homo sapiens
CARHLVEYDILTGYYPRLPWWYFDLW

SEQ ID NO: 61292 - protein, 27 aa, Homo sapiens
CATQQIRVRVSAIRGEYYYYYYGMDVW

SEQ ID NO: 61293 - protein, 19 aa, Homo sapiens
CAREINYDYVWGSGAFDIW

SEQ ID NO: 61294 - protein, 16 aa, Homo sapiens
CAKLNVDTAMDYWDYW

SEQ ID NO: 61295 - protein, 23 aa, Homo sapiens
CAHTKTRGSGYDKTYYYYGMDVW

SEQ ID NO: 61296 - protein, 23 aa, Homo sapiens
CARDLYYYDSSGYLAVAEYFQHW

SEQ ID NO: 61297 - protein, 19 aa, Homo sapiens
CARDSNFPPGYTYAYADYW

SEQ ID NO: 61298 - protein, 26 aa, Homo sapiens
CARVYCTGGSCYSDEYNSGGTYFDYW

SEQ ID NO: 61299 - protein, 18 aa, Homo sapiens
CAKVRFGAVAVTDAFDIW

SEQ ID NO: 61300 - protein, 16 aa, Homo sapiens
CTHSPIIRGVLAFDVW

SEQ ID NO: 61301 - protein, 23 aa, Homo sapiens
CTTDDAYGSGSYPLYYYYGMDVW

SEQ ID NO: 61302 - protein, 17 aa, Homo sapiens
CAKVNQWWLQSNWFDPW

SEQ ID NO: 61303 - protein, 24 aa, Homo sapiens
CAREPRYYYDSSGYPHQTRALDYW

SEQ ID NO: 61304 - protein, 22 aa, Homo sapiens
CAKALGPYCSGGSCYHGLIDYW

SEQ ID NO: 61305 - protein, 14 aa, Homo sapiens
CARHEFGEFWFDPW

SEQ ID NO: 61306 - protein, 24 aa, Homo sapiens
CAKTLNGHYDILTGYTYPLTFDYW

SEQ ID NO: 61307 - protein, 18 aa, Homo sapiens
CAKAPSPYGGNSGYVDYW

SEQ ID NO: 61308 - protein, 16 aa, Homo sapiens
CAKEGGYSYGHEIDYW

SEQ ID NO: 61309 - protein, 21 aa, Homo sapiens
CARDQSSSTFTYHYYYGMDVW

SEQ ID NO: 61310 - protein, 22 aa, Homo sapiens
CRGDCGGDCYSFDYYYYGMDVW

SEQ ID NO: 61311 - protein, 17 aa, Homo sapiens
CARLTYYYGWGSYMGYW

SEQ ID NO: 61312 - protein, 20 aa, Homo sapiens
CSSDVTGTTSFYHYYGMDVW

SEQ ID NO: 61313 - protein, 14 aa, Homo sapiens
CTTGLVRGIITDYW

SEQ ID NO: 61314 - protein, 22 aa, Homo sapiens
CARNMGINYYYRPQYYYGMDVW

SEQ ID NO: 61315 - protein, 25 aa, Homo sapiens
CASQRPRGQSTYSSGWYYYYGMDVW

SEQ ID NO: 61316 - protein, 17 aa, Homo sapiens
CARDQGFGGVPAAFDSW

SEQ ID NO: 61317 - protein, 17 aa, Homo sapiens
CVTEAIAVAGTALVDYW

SEQ ID NO: 61318 - protein, 11 aa, Homo sapiens
CATGNDGMDVW

SEQ ID NO: 61319 - protein, 15 aa, Homo sapiens
CATKGVIWWELPDYW

SEQ ID NO: 61320 - protein, 19 aa, Homo sapiens
CARDAYDILTGYTVEFDYW

SEQ ID NO: 61321 - protein, 20 aa, Homo sapiens
CARHLRGTEAMVSFVSFDYW

SEQ ID NO: 61322 - protein, 16 aa, Homo sapiens
CATGFAVVTPPLFDYW

SEQ ID NO: 61323 - protein, 13 aa, Homo sapiens
CQQCSIWPPAYSF

SEQ ID NO: 61324 - protein, 16 aa, Homo sapiens
CARFHIGVVGGAFDDW

SEQ ID NO: 61325 - protein, 20 aa, Homo sapiens
CARHGPGQQLVPDTQYFLRW

SEQ ID NO: 61326 - protein, 32 aa, Homo sapiens
CAKDARPTYYYDSSGYYYHPPVDYYYYGMDVW

SEQ ID NO: 61327 - protein, 18 aa, Homo sapiens
CATTPSDEFYYYYGMDVW

SEQ ID NO: 61328 - protein, 27 aa, Homo sapiens
CARAAILGSGFGELFLGGYYYYGMDVW

SEQ ID NO: 61329 - protein, 22 aa, Homo sapiens
CARDSWRRRDGYNVQTGAFDIW

SEQ ID NO: 61330 - protein, 14 aa, Homo sapiens
CATQLVAPGAFDIW

SEQ ID NO: 61331 - protein, 17 aa, Homo sapiens
CAKDMTLDSSGYAFDYW

SEQ ID NO: 61332 - protein, 15 aa, Homo sapiens
CAHRLIISGWYFSYW

SEQ ID NO: 61333 - protein, 18 aa, Homo sapiens
CARHQPIIAVSTLGFDYW

SEQ ID NO: 61334 - protein, 19 aa, Homo sapiens
CARQLYYLPGGEHWYLDLW

SEQ ID NO: 61335 - protein, 20 aa, Homo sapiens
CARHAYDHYGDYSEGYFDYW

SEQ ID NO: 61336 - protein, 19 aa, Homo sapiens
CAKLGWVVTPGFEDGMDVW

SEQ ID NO: 61337 - protein, 21 aa, Homo sapiens
CATATTTLWFGELLSSPPDYW

SEQ ID NO: 61338 - protein, 18 aa, Homo sapiens
CAKAPPGIAVSGYSFDYW

SEQ ID NO: 61339 - protein, 19 aa, Homo sapiens
CARMGSSSPNRGGNWFDPW

SEQ ID NO: 61340 - protein, 18 aa, Homo sapiens
CARHWRWLQLVVGWFDPW

SEQ ID NO: 61341 - protein, 19 aa, Homo sapiens
CAKARGYEWALLYFAMDVW

SEQ ID NO: 61342 - protein, 19 aa, Homo sapiens
CAKHHGSSSIYYYYGMDVW

SEQ ID NO: 61343 - protein, 20 aa, Homo sapiens
CAGEYSGSYFDYYYYGMDVW

SEQ ID NO: 61344 - protein, 22 aa, Homo sapiens
CARDTVVFGELFVFYYYGMDVW

SEQ ID NO: 61345 - protein, 22 aa, Homo sapiens
CARERGTDYGDYGPYYYGMDVW

SEQ ID NO: 61346 - protein, 25 aa, Homo sapiens
CARAGYCSGGSCSGEGYYYYGMDVW

SEQ ID NO: 61347 - protein, 17 aa, Homo sapiens
CAKFGVDSGSSMGFDYW

SEQ ID NO: 61348 - protein, 20 aa, Homo sapiens
CASGWGVGATTFYYYGMDVW

SEQ ID NO: 61349 - protein, 20 aa, Homo sapiens
CARDGGPFDSNAYRDAFAIW

SEQ ID NO: 61350 - protein, 14 aa, Homo sapiens
CARSTALETSSDYW

SEQ ID NO: 61351 - protein, 18 aa, Homo sapiens
CARGDSGYSYGDYYFDYW

SEQ ID NO: 61352 - protein, 20 aa, Homo sapiens
CARSTQLGIPLGIGWYFDLW

SEQ ID NO: 61353 - protein, 16 aa, Homo sapiens
CARAGSSWYRVGVDYW

SEQ ID NO: 61354 - protein, 22 aa, Homo sapiens
CARDLYVVPAASDELANWFDPW

SEQ ID NO: 61355 - protein, 17 aa, Homo sapiens
CAHRSDVLLWFGEFGYW

SEQ ID NO: 61356 - protein, 17 aa, Homo sapiens
CARDRGGILESGAFDIW

SEQ ID NO: 61357 - protein, 21 aa, Homo sapiens
CARQVTLRSGELSQRNWFDPW

SEQ ID NO: 61358 - protein, 17 aa, Homo sapiens
CARVSGDTYGSARHDYW

SEQ ID NO: 61359 - protein, 19 aa, Homo sapiens
CARERYSGSWLPLYYFDYW

SEQ ID NO: 61360 - protein, 17 aa, Homo sapiens
CARDLGVGGYHDAFDIW

SEQ ID NO: 61361 - protein, 15 aa, Homo sapiens
CARVDSSGWYVYDYW

SEQ ID NO: 61362 - protein, 20 aa, Homo sapiens
CARYAPDYYDSSSKYYFDYW

SEQ ID NO: 61363 - protein, 17 aa, Homo sapiens
CARDRDRWLVGGAFDVW

SEQ ID NO: 61364 - protein, 19 aa, Homo sapiens
CARPRFTTRYYYYDGMDVW

SEQ ID NO: 61365 - protein, 22 aa, Homo sapiens
CARDLSFYQLLLYNVHPHLDYW

SEQ ID NO: 61366 - protein, 24 aa, Homo sapiens
CATNDLYSGPKYQGYDYGDYGGYW

SEQ ID NO: 61367 - protein, 25 aa, Homo sapiens
CARDPVSVVVVAATPVYYYYGMDVW

SEQ ID NO: 61368 - protein, 19 aa, Homo sapiens
CARVTGVLQLGRLGAFDIW

SEQ ID NO: 61369 - protein, 24 aa, Homo sapiens
CARTDLWVNDYVWGETTGNWFDPW

SEQ ID NO: 61370 - protein, 18 aa, Homo sapiens
CARRSYMVRGVSGAFDIW

SEQ ID NO: 61371 - protein, 14 aa, Homo sapiens
CARQWEPEDYFDHW

SEQ ID NO: 61372 - protein, 15 aa, Homo sapiens
CARGSIADDWYFDLW

SEQ ID NO: 61373 - protein, 24 aa, Homo sapiens
CARTKNELLWFGESSSYYYGMDVW

SEQ ID NO: 61374 - protein, 20 aa, Homo sapiens
CARGSMLRGILIGEDFFDYW

SEQ ID NO: 61375 - protein, 16 aa, Homo sapiens
CARDEVLGYSSVFDYW

SEQ ID NO: 61376 - protein, 25 aa, Homo sapiens
CAKDSYETGTTRGGGYYYYYGMDVW

SEQ ID NO: 61377 - protein, 15 aa, Homo sapiens
CAKGPMVRGVYFDYW

SEQ ID NO: 61378 - protein, 15 aa, Homo sapiens
CVRDIPYSNNWFDYW

SEQ ID NO: 61379 - protein, 20 aa, Homo sapiens
CAYSHSVDTAYYYYYGMDVW

SEQ ID NO: 61380 - protein, 22 aa, Homo sapiens
CARRIVLRYFDWAIQADAFDIW

SEQ ID NO: 61381 - protein, 14 aa, Homo sapiens
CAGCHEPHYYFDYW

SEQ ID NO: 61382 - protein, 17 aa, Homo sapiens
CAREVRQQQLVHWFDPW

SEQ ID NO: 61383 - protein, 26 aa, Homo sapiens
CAKDAGLYYYGSGSIAHYYYYGMDVW

SEQ ID NO: 61384 - protein, 15 aa, Homo sapiens
CARIPNWNDVLFDSW

SEQ ID NO: 61385 - protein, 21 aa, Homo sapiens
CAKDRSLLWFGLGEVGWFDPW

SEQ ID NO: 61386 - protein, 20 aa, Homo sapiens
CAKDLLHYGDVYYYYGMDVW

SEQ ID NO: 61387 - protein, 23 aa, Homo sapiens
CAKRGIIERDYGSGNYGNYFDFW

SEQ ID NO: 61388 - protein, 18 aa, Homo sapiens
CAKAYSYGWVSLLDFDYW

SEQ ID NO: 61389 - protein, 21 aa, Homo sapiens
CARGGWVTMVRGRPSNWFDPW

SEQ ID NO: 61390 - protein, 14 aa, Homo sapiens
CASMWWSPAGIDYW

SEQ ID NO: 61391 - protein, 22 aa, Homo sapiens
CARHLRYCSGGNCYGMGWFDPW

SEQ ID NO: 61392 - protein, 21 aa, Homo sapiens
CAREPSYCSSTSCYSNYFDYW

SEQ ID NO: 61393 - protein, 19 aa, Homo sapiens
CARGTSYYDSSGPWYFDLW

SEQ ID NO: 61394 - protein, 26 aa, Homo sapiens
CARLLITYYYDSSGRTVVYLDAFDIW

SEQ ID NO: 61395 - protein, 25 aa, Homo sapiens
CAKDGGPTYYYDSSGYYPNWYFDLW

SEQ ID NO: 61396 - protein, 24 aa, Homo sapiens
CAKDLWMVAANPNSTYYYYGMDVW

SEQ ID NO: 61397 - protein, 22 aa, Homo sapiens
CARVGAPLYSGSYYYYYGMDVW

SEQ ID NO: 61398 - protein, 13 aa, Homo sapiens
CQSTGSSGIPWVF

SEQ ID NO: 61399 - protein, 19 aa, Homo sapiens
CARDSGPNVAATANHFDYW

SEQ ID NO: 61400 - protein, 16 aa, Homo sapiens
CARELGTTAENYFDYW

SEQ ID NO: 61401 - protein, 16 aa, Homo sapiens
CATDSGYYSRSAFDIW

SEQ ID NO: 61402 - protein, 19 aa, Homo sapiens
CARARREWLRLYYYGMDVW

SEQ ID NO: 61403 - protein, 20 aa, Homo sapiens
CARDWSGDYVLWTGGAPDYW

SEQ ID NO: 61404 - protein, 15 aa, Homo sapiens
CQSGDNSGAFPYVVF

SEQ ID NO: 61405 - protein, 17 aa, Homo sapiens
CARDSSERGENWYFDLW

SEQ ID NO: 61406 - protein, 19 aa, Homo sapiens
CARGTREGLRHYRWYFDYW

SEQ ID NO: 61407 - protein, 21 aa, Homo sapiens
CARPSGYSYGYVDYYYGMDVW

SEQ ID NO: 61408 - protein, 20 aa, Homo sapiens
CAKDQGAMVLSYYYYGMDVW

SEQ ID NO: 61409 - protein, 15 aa, Homo sapiens
CARHGSKWGNWLDPW

SEQ ID NO: 61410 - protein, 14 aa, Homo sapiens
CAHRGRITISLDYW

SEQ ID NO: 61411 - protein, 22 aa, Homo sapiens
CARTPPGDYDSSAYYSLDFDYW

SEQ ID NO: 61412 - protein, 18 aa, Homo sapiens
CARTSLVLLWFGDYFDYW

SEQ ID NO: 61413 - protein, 19 aa, Homo sapiens
CARGPIAVAGTPPYYFDYW

SEQ ID NO: 61414 - protein, 21 aa, Homo sapiens
CARRGYSSSWPTTYYYGMDVW

SEQ ID NO: 61415 - protein, 28 aa, Homo sapiens
CARDIGPNYDILTGLNPDWYYYYGMDVW

SEQ ID NO: 61416 - protein, 16 aa, Homo sapiens
CAIIVATISPRVFDYW

SEQ ID NO: 61417 - protein, 26 aa, Homo sapiens
CARVPLYDYVWGTLDLNYYYYGMDVW

SEQ ID NO: 61418 - protein, 22 aa, Homo sapiens
CAKDTAMVLGRSNLNPQPADYW

SEQ ID NO: 61419 - protein, 20 aa, Homo sapiens
CATDYGDYGMGSTDDAFDVW

SEQ ID NO: 61420 - protein, 18 aa, Homo sapiens
CVRGGYSLSGSYFPFEYW

SEQ ID NO: 61421 - protein, 21 aa, Homo sapiens
CARDAQFCSSPTCFTYYFDYW

SEQ ID NO: 61422 - protein, 18 aa, Homo sapiens
CARDLGLRFSNNNWFDPW

SEQ ID NO: 61423 - protein, 15 aa, Homo sapiens
CAHSIISSGWSLDYW

SEQ ID NO: 61424 - protein, 19 aa, Homo sapiens
CARGYCSSTSCQTVPFDYW

SEQ ID NO: 61425 - protein, 17 aa, Homo sapiens
CARENYDTDGHYFEDYW

SEQ ID NO: 61426 - protein, 18 aa, Homo sapiens
CARNSAIPVVTDNWFDPW

SEQ ID NO: 61427 - protein, 20 aa, Homo sapiens
CARHHNDYVWGSYRYGFDPW

SEQ ID NO: 61428 - protein, 26 aa, Homo sapiens
CARGMIAVAGTGEHGGYYYYYGMDVW

SEQ ID NO: 61429 - protein, 24 aa, Homo sapiens
CARDNPMDYDYVWGSYRYVGFDYW

SEQ ID NO: 61430 - protein, 22 aa, Homo sapiens
CARGGYCSGGSCYFTLDAFDIW

SEQ ID NO: 61431 - protein, 14 aa, Homo sapiens
CARHYDNAGYYDSW

SEQ ID NO: 61432 - protein, 21 aa, Homo sapiens
CAHTLYSSSWYRLGVDWFDPW

SEQ ID NO: 61433 - protein, 24 aa, Homo sapiens
CARVSSDIVATIWDYYYYYGMDVW

SEQ ID NO: 61434 - protein, 22 aa, Homo sapiens
CARVPWKVWTPRYYYYYGMDVW

SEQ ID NO: 61435 - protein, 14 aa, Homo sapiens
CARGGYGDWYLDSW

SEQ ID NO: 61436 - protein, 22 aa, Homo sapiens
CARGGIDYGDYLLSEGWYFDLW

SEQ ID NO: 61437 - protein, 27 aa, Homo sapiens
CARVGYYGSGSWFRYLGPYYYYGMDVW

SEQ ID NO: 61438 - protein, 23 aa, Homo sapiens
CARGREYDSRGYPGLPPYHFDSW

SEQ ID NO: 61439 - protein, 20 aa, Homo sapiens
CARGRYSSSWYYSRSDFDYW

SEQ ID NO: 61440 - protein, 16 aa, Homo sapiens
CAHGWWLGGFDAFDIW

SEQ ID NO: 61441 - protein, 16 aa, Homo sapiens
CAHTITIFTLNWFDPW

SEQ ID NO: 61442 - protein, 20 aa, Homo sapiens
CARDQYCSGGSCYYYGMDVW

SEQ ID NO: 61443 - protein, 14 aa, Homo sapiens
CAGGIAAVGDFDYW

SEQ ID NO: 61444 - protein, 26 aa, Homo sapiens
CARSIWVGEQWLVLNPNLYYYGMDVW

SEQ ID NO: 61445 - protein, 16 aa, Homo sapiens
CVRHGRAAWQVRFDYW

SEQ ID NO: 61446 - protein, 16 aa, Homo sapiens
CAKCSSRGRAGAVDVW

SEQ ID NO: 61447 - protein, 16 aa, Homo sapiens
CATVHGGWTPYYFDYW

SEQ ID NO: 61448 - protein, 19 aa, Homo sapiens
CAKNAARGYSSSWAYFDYW

SEQ ID NO: 61449 - protein, 19 aa, Homo sapiens
CASKTSSGYRGANDAFDIW

SEQ ID NO: 61450 - protein, 18 aa, Homo sapiens
CATAIELAQETRGAFHIW

SEQ ID NO: 61451 - protein, 19 aa, Homo sapiens
CARDGAPGILTGYHWFDPW

SEQ ID NO: 61452 - protein, 16 aa, Homo sapiens
CARDLDAGYSNAMDVW

SEQ ID NO: 61453 - protein, 12 aa, Homo sapiens
CAHKGHNYFNYW

SEQ ID NO: 61454 - protein, 18 aa, Homo sapiens
CARSDVYSGHDFISLDYW

SEQ ID NO: 61455 - protein, 17 aa, Homo sapiens
CAKDINVGNYYYAMDVW

SEQ ID NO: 61456 - protein, 18 aa, Homo sapiens
CAHLYSGSYYELDYFDYW

SEQ ID NO: 61457 - protein, 21 aa, Homo sapiens
CAKDLGTEWLAQYYYYGLDVW

SEQ ID NO: 61458 - protein, 15 aa, Homo sapiens
CASTVAVFVDYFDYW

SEQ ID NO: 61459 - protein, 20 aa, Homo sapiens
CAKDHEEVRGEYYYYGMDVW

SEQ ID NO: 61460 - protein, 22 aa, Homo sapiens
CARGSLLRYFDWLFFEDGMDVW

SEQ ID NO: 61461 - protein, 15 aa, Homo sapiens
CVPRSSALTAIFDYW

SEQ ID NO: 61462 - protein, 23 aa, Homo sapiens
CATHRSDYYDSSGYYLTPGFDYW

SEQ ID NO: 61463 - protein, 18 aa, Homo sapiens
CARGARNTMVRGVNFDYW

SEQ ID NO: 61464 - protein, 18 aa, Homo sapiens
CARYQWELLRSADAFDIW

SEQ ID NO: 61465 - protein, 23 aa, Homo sapiens
CARVFLDWNDNDDDYYYYGMDVW

SEQ ID NO: 61466 - protein, 25 aa, Homo sapiens
CARGGYCSGGSCYFVSSYYYGMDVW

SEQ ID NO: 61467 - protein, 23 aa, Homo sapiens
CARSRPVTMIVVVTTRPYYFDYW

SEQ ID NO: 61468 - protein, 21 aa, Homo sapiens
CAHRPSPSSFFSGTNYYFDFW

SEQ ID NO: 61469 - protein, 17 aa, Homo sapiens
CARREGGYDSRVGYDYW

SEQ ID NO: 61470 - protein, 19 aa, Homo sapiens
CAKAPPEYSSSSSNWFDPW

SEQ ID NO: 61471 - protein, 22 aa, Homo sapiens
CARHGHRIWYSSGPGRDWFDPW

SEQ ID NO: 61472 - protein, 21 aa, Homo sapiens
CARVDCGGFSGYGCAEYFQHW

SEQ ID NO: 61473 - protein, 12 aa, Homo sapiens
CARTRGNDIDYW

SEQ ID NO: 61474 - protein, 17 aa, Homo sapiens
CAKDMGATVVTPGLDYW

SEQ ID NO: 61475 - protein, 24 aa, Homo sapiens
CASSELVVTAIRKAYYYYYGMDVW

SEQ ID NO: 61476 - protein, 21 aa, Homo sapiens
CAILYGDLPEEIGDRDAFDIW

SEQ ID NO: 61477 - protein, 16 aa, Homo sapiens
CASVEYGSGSYSPDYW

SEQ ID NO: 61478 - protein, 20 aa, Homo sapiens
CARGTVWFGDNTSLDAFDIW

SEQ ID NO: 61479 - protein, 15 aa, Homo sapiens
CALIPAGIFDSFDIW

SEQ ID NO: 61480 - protein, 16 aa, Homo sapiens
CAKPPHSGSPSYFDYW

SEQ ID NO: 61481 - protein, 19 aa, Homo sapiens
CAIWAAQQLAVRGLSFDYW

SEQ ID NO: 61482 - protein, 16 aa, Homo sapiens
CARVMAHYDNYAFDFW

SEQ ID NO: 61483 - protein, 21 aa, Homo sapiens
CARSSAGDCSSTSCYVSFDYW

SEQ ID NO: 61484 - protein, 20 aa, Homo sapiens
CAHGGNTAMVTKTLYYFDYW

SEQ ID NO: 61485 - protein, 17 aa, Homo sapiens
CARDRAHFILGTDFDYW

SEQ ID NO: 61486 - protein, 19 aa, Homo sapiens
CARDATNDYGDYADAFDIW

SEQ ID NO: 61487 - protein, 14 aa, Homo sapiens
CARLGMGLGALDVW

SEQ ID NO: 61488 - protein, 13 aa, Homo sapiens
CARGVGFVTLDYW

SEQ ID NO: 61489 - protein, 14 aa, Homo sapiens
CAHLTTIQAAPDYW

SEQ ID NO: 61490 - protein, 17 aa, Homo sapiens
CARDWEWAAVAGPGDYW

SEQ ID NO: 61491 - protein, 21 aa, Homo sapiens
CARHPSYCSGGSCFLRYFDYW

SEQ ID NO: 61492 - protein, 22 aa, Homo sapiens
CAKDFYHYYDNSGYYPYYFDTW

SEQ ID NO: 61493 - protein, 18 aa, Homo sapiens
CAKISSSGWYLYDAFDIW

SEQ ID NO: 61494 - protein, 19 aa, Homo sapiens
CARDIRYSYTYYYYGMDVW

SEQ ID NO: 61495 - protein, 15 aa, Homo sapiens
CARKTGTPKDAFDIW

SEQ ID NO: 61496 - protein, 17 aa, Homo sapiens
CGRSPPVAAKGHYSDYW

SEQ ID NO: 61497 - protein, 19 aa, Homo sapiens
CAHTHYDILTGYEVAFDIW

SEQ ID NO: 61498 - protein, 24 aa, Homo sapiens
CARTPYSSGWYLGDYYYYYGMDVW

SEQ ID NO: 61499 - protein, 15 aa, Homo sapiens
CARDEKGAGLGLDYW

SEQ ID NO: 61500 - protein, 22 aa, Homo sapiens
CASVGGYSGYVDLYYYYGMDVW

SEQ ID NO: 61501 - protein, 19 aa, Homo sapiens
CARHLTFSGYYSEAFFDYW

SEQ ID NO: 61502 - protein, 17 aa, Homo sapiens
CARVIDGTGWSPGFDFW

SEQ ID NO: 61503 - protein, 23 aa, Homo sapiens
CARGAADSGYDYVDWGDDYFDYW

SEQ ID NO: 61504 - protein, 20 aa, Homo sapiens
CAKNLPTIHGSGAKDYFDYW

SEQ ID NO: 61505 - protein, 15 aa, Homo sapiens
CYSSGWIEDWYFDLW

SEQ ID NO: 61506 - protein, 16 aa, Homo sapiens
CSTWSDSYSAPAFDLW

SEQ ID NO: 61507 - protein, 14 aa, Homo sapiens
CARSTPSREYFQHW

SEQ ID NO: 61508 - protein, 16 aa, Homo sapiens
CARKYCTGPTCHLDYW

SEQ ID NO: 61509 - protein, 16 aa, Homo sapiens
CARAPRGSSISFFDYW

SEQ ID NO: 61510 - protein, 20 aa, Homo sapiens
CARGGGWLRLRGDKAYFDYW

SEQ ID NO: 61511 - protein, 12 aa, Homo sapiens
CTTRATGTGDYW

SEQ ID NO: 61512 - protein, 13 aa, Homo sapiens
CVKMSVWNYFQFW

SEQ ID NO: 61513 - protein, 24 aa, Homo sapiens
CARGPLITFGGVIASSLYNWFDPW

SEQ ID NO: 61514 - protein, 20 aa, Homo sapiens
CASKSYDGSSWYGEHAFDIW

SEQ ID NO: 61515 - protein, 13 aa, Homo sapiens
CASFLLGYWFDPW

SEQ ID NO: 61516 - protein, 20 aa, Homo sapiens
CAKDTHVLLWFGEYIGPDYW

SEQ ID NO: 61517 - protein, 17 aa, Homo sapiens
CAKTGCSGGSCYLGDYW

SEQ ID NO: 61518 - protein, 15 aa, Homo sapiens
CAVWDDFLNGRPWVF

SEQ ID NO: 61519 - protein, 16 aa, Homo sapiens
CVREMTTVVIDALDMW

SEQ ID NO: 61520 - protein, 18 aa, Homo sapiens
CARSESGSWTEKYYFDYW

SEQ ID NO: 61521 - protein, 26 aa, Homo sapiens
CAREVHDSSGLSLFGVQYYYYGMDVW

SEQ ID NO: 61522 - protein, 23 aa, Homo sapiens
CARHDGDGGPRNPHYYYYGLDVW

SEQ ID NO: 61523 - protein, 16 aa, Homo sapiens
CARRGVRYYYEEFDYW

SEQ ID NO: 61524 - protein, 26 aa, Homo sapiens
CAKDTYYYDSSGYYYPPYYYYGMDVW

SEQ ID NO: 61525 - protein, 21 aa, Homo sapiens
CARQGISLLRGVINNNWFDPW

SEQ ID NO: 61526 - protein, 20 aa, Homo sapiens
CARSDSSGLAWGYYYGMDVW

SEQ ID NO: 61527 - protein, 22 aa, Homo sapiens
CARYRRMYPPGFGGNTWYFDLW

SEQ ID NO: 61528 - protein, 17 aa, Homo sapiens
CSRVRNDYGDYNAFDFW

SEQ ID NO: 61529 - protein, 20 aa, Homo sapiens
CARDYVEGSITIWVAGFDPW

SEQ ID NO: 61530 - protein, 14 aa, Homo sapiens
CARSSVEQLPPDYW

SEQ ID NO: 61531 - protein, 16 aa, Homo sapiens
CARGVDEQWLVYPDYW

SEQ ID NO: 61532 - protein, 23 aa, Homo sapiens
CARDRWEQWLVRGAYYYYGMDVW

SEQ ID NO: 61533 - protein, 23 aa, Homo sapiens
CARDLGYFDWLLTTTKITGFDYW

SEQ ID NO: 61534 - protein, 15 aa, Homo sapiens
CARMLRGVDDAFEMW

SEQ ID NO: 61535 - protein, 17 aa, Homo sapiens
CAKKSWGYDSSGYPDYW

SEQ ID NO: 61536 - protein, 16 aa, Homo sapiens
CAKKFSDAYLSYFDFW

SEQ ID NO: 61537 - protein, 17 aa, Homo sapiens
CAKDIYPYGSGSYYDYW

SEQ ID NO: 61538 - protein, 22 aa, Homo sapiens
CASTDIVVVTAIPGFAEYFQHW

SEQ ID NO: 61539 - protein, 19 aa, Homo sapiens
CAKVRGIYESSGSDAFDIW

SEQ ID NO: 61540 - protein, 20 aa, Homo sapiens
CARDPPYSSSWYGSNHFDYW

SEQ ID NO: 61541 - protein, 21 aa, Homo sapiens
CARGYFYDNSVYYYFNYFYYW

SEQ ID NO: 61542 - protein, 21 aa, Homo sapiens
CARIDWGYSYGYNRYYGMDVW

SEQ ID NO: 61543 - protein, 18 aa, Homo sapiens
CVKDIGSRAGARSYFGRW

SEQ ID NO: 61544 - protein, 18 aa, Homo sapiens
CARFSEPANYYYYGMDVW

SEQ ID NO: 61545 - protein, 20 aa, Homo sapiens
CARDGWHYYGSGRSSPFDYW

SEQ ID NO: 61546 - protein, 13 aa, Homo sapiens
CLLFSGGAQVGVF

SEQ ID NO: 61547 - protein, 16 aa, Homo sapiens
CARTYETRGYLFFDYW

SEQ ID NO: 61548 - protein, 26 aa, Homo sapiens
CAREPPARESPYSSSWYRYYYGMDVW

SEQ ID NO: 61549 - protein, 22 aa, Homo sapiens
CARDCLGKYQLLSFSGNWFDPW

SEQ ID NO: 61550 - protein, 14 aa, Homo sapiens
CASHRATWHAFDYW

SEQ ID NO: 61551 - protein, 17 aa, Homo sapiens
CARERAVAGNPASFDYW

SEQ ID NO: 61552 - protein, 21 aa, Homo sapiens
CARGLLPPPTVTIYYYGMDVW

SEQ ID NO: 61553 - protein, 26 aa, Homo sapiens
CARGPTYCSGGSCYLTPYYYYGMDVW

SEQ ID NO: 61554 - protein, 21 aa, Homo sapiens
CAHRHLYSDETGYYEGGFDYW

SEQ ID NO: 61555 - protein, 28 aa, Homo sapiens
CARDYDYVWGSYRYGSHSMDYYYGMDVW

SEQ ID NO: 61556 - protein, 21 aa, Homo sapiens
CARHTPLYDRSGYHPYYFDYW

SEQ ID NO: 61557 - protein, 18 aa, Homo sapiens
CARDLGVLLPYGGWFDPW

SEQ ID NO: 61558 - protein, 20 aa, Homo sapiens
CARDMGAYGYNYYYYGMDVW

SEQ ID NO: 61559 - protein, 22 aa, Homo sapiens
CAKDWLTVATPGYVYYYGMDVW

SEQ ID NO: 61560 - protein, 20 aa, Homo sapiens
CARPYGGNYYSYYYYGMDVW

SEQ ID NO: 61561 - protein, 25 aa, Homo sapiens
CARSPYCSGGSCLYGDYLAGWFDPW

SEQ ID NO: 61562 - protein, 19 aa, Homo sapiens
CASWAIVVVTTTDDAFDIW

SEQ ID NO: 61563 - protein, 18 aa, Homo sapiens
CAKDMSDGYNWFRTFDYW

SEQ ID NO: 61564 - protein, 25 aa, Homo sapiens
CAKDSRSCAYCSTWDYNYYHGMDVW

SEQ ID NO: 61565 - protein, 18 aa, Homo sapiens
CAKGSSGSYLREVFFDYW

SEQ ID NO: 61566 - protein, 18 aa, Homo sapiens
CARHGQQQLVHSGYFQHW

SEQ ID NO: 61567 - protein, 21 aa, Homo sapiens
CARDKHGMVRGVIINVWFDPW

SEQ ID NO: 61568 - protein, 17 aa, Homo sapiens
CAKGSGPHYYGLEVDYW

SEQ ID NO: 61569 - protein, 16 aa, Homo sapiens
CARGSSGWYFWGVDYW

SEQ ID NO: 61570 - protein, 24 aa, Homo sapiens
CARDPGFGSSGWYWGHETYYFDYW

SEQ ID NO: 61571 - protein, 17 aa, Homo sapiens
CARVVITFGGVIVIDYW

SEQ ID NO: 61572 - protein, 18 aa, Homo sapiens
CARIDPRLRWDEPFFDYW

SEQ ID NO: 61573 - protein, 15 aa, Homo sapiens
CAKAGETLASNFDYW

SEQ ID NO: 61574 - protein, 22 aa, Homo sapiens
CARRTLLWFGELSHMPDAFDIW

SEQ ID NO: 61575 - protein, 21 aa, Homo sapiens
CAREGQGMYNWNDGSNWFDPW

SEQ ID NO: 61576 - protein, 20 aa, Homo sapiens
CAKDGEKDYQFAPFRYFDLW

SEQ ID NO: 61577 - protein, 17 aa, Homo sapiens
CARAYYYDSDEDAFDIW

SEQ ID NO: 61578 - protein, 24 aa, Homo sapiens
CARALVEYYYDSSGYLSEVRFDYW

SEQ ID NO: 61579 - protein, 20 aa, Homo sapiens
CARGVVEPVANMGHSWFDPW

SEQ ID NO: 61580 - protein, 21 aa, Homo sapiens
CARLGGSGSYDHFYYYGMDVW

SEQ ID NO: 61581 - protein, 25 aa, Homo sapiens
CARGGWVRGYSGYDPYYITGGFDYW

SEQ ID NO: 61582 - protein, 13 aa, Homo sapiens
CARVFGISAFDIW

SEQ ID NO: 61583 - protein, 18 aa, Homo sapiens
CARENYYGSATYYWFDPW

SEQ ID NO: 61584 - protein, 25 aa, Homo sapiens
CALPISAVYYCARVRLWFGELEDYW

SEQ ID NO: 61585 - protein, 22 aa, Homo sapiens
CARGHGGLTGYYNVIFSYFDYW

SEQ ID NO: 61586 - protein, 13 aa, Homo sapiens
CARWWTGSQFEYW

SEQ ID NO: 61587 - protein, 22 aa, Homo sapiens
CARHVSVLLWFGEVIPPTFDYW

SEQ ID NO: 61588 - protein, 15 aa, Homo sapiens
CARLRAGWYFGFDYW

SEQ ID NO: 61589 - protein, 26 aa, Homo sapiens
CAKDRGGCSGGSCYPIYYYYYGMDVW

SEQ ID NO: 61590 - protein, 17 aa, Homo sapiens
CAMNSGANDRHDAFDIW

SEQ ID NO: 61591 - protein, 24 aa, Homo sapiens
CATPVGYSYGQRKHLPADNWFDPW

SEQ ID NO: 61592 - protein, 17 aa, Homo sapiens
CTTDFTVTTDGVSFDYW

SEQ ID NO: 61593 - protein, 21 aa, Homo sapiens
CARDPPGFSGYDFRLDPVDIW

SEQ ID NO: 61594 - protein, 19 aa, Homo sapiens
CAKDRGPPDPAAAGSFDYW

SEQ ID NO: 61595 - protein, 19 aa, Homo sapiens
CVKASRIGTGWYFDAFDVW

SEQ ID NO: 61596 - protein, 13 aa, Homo sapiens
CAKSAIWSFYDYW

SEQ ID NO: 61597 - protein, 19 aa, Homo sapiens
CARHYYDSSGYSDLDFDYW

SEQ ID NO: 61598 - protein, 19 aa, Homo sapiens
CAGFDYYGSGSYYNPFDYW

SEQ ID NO: 61599 - protein, 18 aa, Homo sapiens
CARVDGVLIAAAGQIDYW

SEQ ID NO: 61600 - protein, 25 aa, Homo sapiens
CARHSPFNMYDLDWSGNTYGPFDYW

SEQ ID NO: 61601 - protein, 18 aa, Homo sapiens
CATLRGTYYYDSSGLDYW

SEQ ID NO: 61602 - protein, 20 aa, Homo sapiens
CARDPSPHSMVRGVNLFDYW

SEQ ID NO: 61603 - protein, 18 aa, Homo sapiens
CATEVSPYSSSWPIFDYW

SEQ ID NO: 61604 - protein, 15 aa, Homo sapiens
CASGYYYAGGFGDYW

SEQ ID NO: 61605 - protein, 19 aa, Homo sapiens
CARDRSSSWFPMVFWFDPW

SEQ ID NO: 61606 - protein, 21 aa, Homo sapiens
CARGLLWFGELPREYDAFDIW

SEQ ID NO: 61607 - protein, 31 aa, Homo sapiens
CARAINRGGDYGDYIEAILRGYYYYYGMDVW

SEQ ID NO: 61608 - protein, 19 aa, Homo sapiens
CARTNRGWLQLPQIYFDYW

SEQ ID NO: 61609 - protein, 14 aa, Homo sapiens
CQQRSNWPPGPVTF

SEQ ID NO: 61610 - protein, 24 aa, Homo sapiens
CARHRGDYDILTGPLRFYNWFDPW

SEQ ID NO: 61611 - protein, 16 aa, Homo sapiens
CAKWDRGAGNYYLSYW

SEQ ID NO: 61612 - protein, 16 aa, Homo sapiens
CAKTVPAALYNWFDPW

SEQ ID NO: 61613 - protein, 14 aa, Homo sapiens
CYSRDTSGNHLMMF

SEQ ID NO: 61614 - protein, 20 aa, Homo sapiens
CARLHGPRGFDYYYYGMDVW

SEQ ID NO: 61615 - protein, 17 aa, Homo sapiens
CAKDGATMVPIHWFDPW

SEQ ID NO: 61616 - protein, 22 aa, Homo sapiens
CARGVVLQWFGAGDLSYAFDIW

SEQ ID NO: 61617 - protein, 17 aa, Homo sapiens
CAKGSGRGYSYGYHDYW

SEQ ID NO: 61618 - protein, 20 aa, Homo sapiens
CAKDARRGVATSRNYYFDYW

SEQ ID NO: 61619 - protein, 18 aa, Homo sapiens
CARYAYGNNWYLGWFGPW

SEQ ID NO: 61620 - protein, 20 aa, Homo sapiens
CAKEESITMIVVVITIFDYW

SEQ ID NO: 61621 - protein, 18 aa, Homo sapiens
CARERPLGSGWTDAFDIW

SEQ ID NO: 61622 - protein, 23 aa, Homo sapiens
CARSQKRWLQFPRHTLYWYFDLW

SEQ ID NO: 61623 - protein, 23 aa, Homo sapiens
CARDHPAQGGWFGELYYYGMDVW

SEQ ID NO: 61624 - protein, 22 aa, Homo sapiens
CARDHNEIQLWLRSYYYGMDVW

SEQ ID NO: 61625 - protein, 20 aa, Homo sapiens
CARWFRDDSSGSTGNAFDIW

SEQ ID NO: 61626 - protein, 17 aa, Homo sapiens
CARTSREYQLLSHFDQW

SEQ ID NO: 61627 - protein, 17 aa, Homo sapiens
CARALNERWFTPSFDPW

SEQ ID NO: 61628 - protein, 21 aa, Homo sapiens
CARDLLDGYCSGGSCSLYDYW

SEQ ID NO: 61629 - protein, 23 aa, Homo sapiens
CARLVYYDYVWGSYRNKGYFDYW

SEQ ID NO: 61630 - protein, 22 aa, Homo sapiens
CARHKTLYYYDSSGYYSEFDYW

SEQ ID NO: 61631 - protein, 21 aa, Homo sapiens
CARNLLYGDYVSGYYYGMDVW

SEQ ID NO: 61632 - protein, 21 aa, Homo sapiens
CARQQDVLLWFGELLGPFDYW

SEQ ID NO: 61633 - protein, 18 aa, Homo sapiens
CATGSPVVAANQNWFDPW

SEQ ID NO: 61634 - protein, 24 aa, Homo sapiens
CARDTNIHYDSSGYYYVAYGMDVW

SEQ ID NO: 61635 - protein, 19 aa, Homo sapiens
CAKSLKISYSTFNQLFDYW

SEQ ID NO: 61636 - protein, 16 aa, Homo sapiens
CARGGSASWYDPLDYW

SEQ ID NO: 61637 - protein, 20 aa, Homo sapiens
CATPGPYYYDPTGYYPFDYW

SEQ ID NO: 61638 - protein, 17 aa, Homo sapiens
CARLAGSGSYRGAFDIW

SEQ ID NO: 61639 - protein, 24 aa, Homo sapiens
CARVRAAAGRPFVYYYYYDGLDVW

SEQ ID NO: 61640 - protein, 24 aa, Homo sapiens
CAKDRGDIVVAMSATKRAYFFDFW

SEQ ID NO: 61641 - protein, 18 aa, Homo sapiens
CVKLDRSDWYAGYHFDYW

SEQ ID NO: 61642 - protein, 18 aa, Homo sapiens
CARGASDIVAGGAWFDPW

SEQ ID NO: 61643 - protein, 24 aa, Homo sapiens
CARHKDYYVSGNYGVGEYNWFDPW

SEQ ID NO: 61644 - protein, 13 aa, Homo sapiens
CVQGTHWPPSLSF

SEQ ID NO: 61645 - protein, 20 aa, Homo sapiens
CGYSSSWGGSFYYYYGMDVW

SEQ ID NO: 61646 - protein, 21 aa, Homo sapiens
CARSNSRGHPGYDDVPRLDYW

SEQ ID NO: 61647 - protein, 24 aa, Homo sapiens
CARDRKDELWFVGLAGYYYGMDVW

SEQ ID NO: 61648 - protein, 20 aa, Homo sapiens
CAREWITMVREKIHNWFDPW

SEQ ID NO: 61649 - protein, 17 aa, Homo sapiens
CARKATGTVHPEYFHHW

SEQ ID NO: 61650 - protein, 18 aa, Homo sapiens
CARDYSGYDLAGTHFDYW

SEQ ID NO: 61651 - protein, 25 aa, Homo sapiens
CATAPAVFSGVVAATWYYYYGMDVW

SEQ ID NO: 61652 - protein, 22 aa, Homo sapiens
CARDQQGYSSGWYSEYYGMDVW

SEQ ID NO: 61653 - protein, 13 aa, Homo sapiens
CAKDRDTRHFDHW

SEQ ID NO: 61654 - protein, 24 aa, Homo sapiens
CARERWSSGSYYKGYYYYYGMDVW

SEQ ID NO: 61655 - protein, 13 aa, Homo sapiens
CTQWLAEYYFDYW

SEQ ID NO: 61656 - protein, 23 aa, Homo sapiens
CARDPQRPDYYDSSGWSDAFDIW

SEQ ID NO: 61657 - protein, 23 aa, Homo sapiens
CARTLRAYDYVWGSYRHDAFDIW

SEQ ID NO: 61658 - protein, 20 aa, Homo sapiens
CARETHYFGYSSSWYDVDYW

SEQ ID NO: 61659 - protein, 24 aa, Homo sapiens
CARDGGVGATSGKYYYYYYGMDVW

SEQ ID NO: 61660 - protein, 16 aa, Homo sapiens
CARRDDYIDKGWFDPW

SEQ ID NO: 61661 - protein, 17 aa, Homo sapiens
CAGIQLAYRGSNYFDYW

SEQ ID NO: 61662 - protein, 19 aa, Homo sapiens
CARHIKGRGSYPPYYFDYW

SEQ ID NO: 61663 - protein, 22 aa, Homo sapiens
CATDYLREQQLGVYYYYGMDVW

SEQ ID NO: 61664 - protein, 16 aa, Homo sapiens
CVKGRNSVYSSNWDYW

SEQ ID NO: 61665 - protein, 19 aa, Homo sapiens
CVKDMSGAMGLRSTRVDYW

SEQ ID NO: 61666 - protein, 19 aa, Homo sapiens
CAKDRMVTAILDGDAFDIW

SEQ ID NO: 61667 - protein, 21 aa, Homo sapiens
CARDSYSSGWQNYYYYGMDVW

SEQ ID NO: 61668 - protein, 22 aa, Homo sapiens
CARARFIAAARGFYYYYGMDVW

SEQ ID NO: 61669 - protein, 18 aa, Homo sapiens
CASSRYSSGPKGGQLDYW

SEQ ID NO: 61670 - protein, 22 aa, Homo sapiens
CARDMWTATRTFYYYYYGMDVW

SEQ ID NO: 61671 - protein, 19 aa, Homo sapiens
CAKKLPCSGSNCYDLSDYW

SEQ ID NO: 61672 - protein, 25 aa, Homo sapiens
CARDTPPDYGDYVYHTYYYYGMDVW

SEQ ID NO: 61673 - protein, 20 aa, Homo sapiens
CARKPPYDDYDTSGYYIDQW

SEQ ID NO: 61674 - protein, 17 aa, Homo sapiens
CASGPTRCSSTSCSDYW

SEQ ID NO: 61675 - protein, 25 aa, Homo sapiens
CAREQLYYYDSGSSLGGAYNWFDPW

SEQ ID NO: 61676 - protein, 16 aa, Homo sapiens
CASRDLVVTLGAFDIW

SEQ ID NO: 61677 - protein, 23 aa, Homo sapiens
CAKDGGLYDSRTALYYYYGMDVW

SEQ ID NO: 61678 - protein, 15 aa, Homo sapiens
CTREQTERGDAFDVW

SEQ ID NO: 61679 - protein, 18 aa, Homo sapiens
CARGNIGQWLVRMPFDYW

SEQ ID NO: 61680 - protein, 19 aa, Homo sapiens
CARVTTVVKALPYWYFDLW

SEQ ID NO: 61681 - protein, 22 aa, Homo sapiens
CAREPPGLRWAVITWVGPLDYW

SEQ ID NO: 61682 - protein, 24 aa, Homo sapiens
CAREVYVAAAGTGYYYYYYGMDVW

SEQ ID NO: 61683 - protein, 20 aa, Homo sapiens
CAISTVTTTLYYYYYGMDVW

SEQ ID NO: 61684 - protein, 25 aa, Homo sapiens
CARDPNTAPFYDILTGYSYGAFDIW

SEQ ID NO: 61685 - protein, 24 aa, Homo sapiens
CARQRIEMASTWGAVYYYYGMDVW

SEQ ID NO: 61686 - protein, 20 aa, Homo sapiens
CARSHPSPTTYYYDSSGDYW

SEQ ID NO: 61687 - protein, 20 aa, Homo sapiens
CAHIRGSGWYGPHLDAFDIW

SEQ ID NO: 61688 - protein, 16 aa, Homo sapiens
CARSYYDISFNWFDPW

SEQ ID NO: 61689 - protein, 26 aa, Homo sapiens
CAKVFSSSDLLLWFGGIYYYYGMDVW

SEQ ID NO: 61690 - protein, 18 aa, Homo sapiens
CARDMGLLQWLDLHFDYW

SEQ ID NO: 61691 - protein, 17 aa, Homo sapiens
CAHRGVAAMVTGWFDPW

SEQ ID NO: 61692 - protein, 20 aa, Homo sapiens
CAHFGRGSSGYDVSDAFDIW

SEQ ID NO: 61693 - protein, 30 aa, Homo sapiens
CALPISAVYYCARHGAGSRQSYYYYGMDVW

SEQ ID NO: 61694 - protein, 18 aa, Homo sapiens
CAKMPYYDSSGEDYFDYW

SEQ ID NO: 61695 - protein, 16 aa, Homo sapiens
CAKDGAWNSYDHFDYW

SEQ ID NO: 61696 - protein, 28 aa, Homo sapiens
CAREPIYRNLMITFGGVIPYYYYGMDVW

SEQ ID NO: 61697 - protein, 15 aa, Homo sapiens
CATAFAINPTPFDYW

SEQ ID NO: 61698 - protein, 16 aa, Homo sapiens
CAREWVAPGTVRFDYW

SEQ ID NO: 61699 - protein, 16 aa, Homo sapiens
CARERWLQFYSYFDYW

SEQ ID NO: 61700 - protein, 23 aa, Homo sapiens
CVREVVGIQLWPNAYYYYGMDVW

SEQ ID NO: 61701 - protein, 18 aa, Homo sapiens
CARTGVDILTGLYYFDYW

SEQ ID NO: 61702 - protein, 16 aa, Homo sapiens
CASESMTTVTADLDYW

SEQ ID NO: 61703 - protein, 20 aa, Homo sapiens
CARPGVGHWSGSYYGPFDYW

SEQ ID NO: 61704 - protein, 20 aa, Homo sapiens
CARLSFCGGDCYYGHWFDPW

SEQ ID NO: 61705 - protein, 22 aa, Homo sapiens
CARYPTGGPYCSGGSCYHFDYW

SEQ ID NO: 61706 - protein, 16 aa, Homo sapiens
CARDRAQQLWYLIDYW

SEQ ID NO: 61707 - protein, 18 aa, Homo sapiens
CARGRITFIRGIIAFDYW

SEQ ID NO: 61708 - protein, 17 aa, Homo sapiens
CARDYYEGTYSSGLDYW

SEQ ID NO: 61709 - protein, 22 aa, Homo sapiens
CARGYMITFGGVIVIPERLDYW

SEQ ID NO: 61710 - protein, 21 aa, Homo sapiens
CARDQSYSGYDYYYYYGMDVW

SEQ ID NO: 61711 - protein, 14 aa, Homo sapiens
CTTRSVIKDAFDIW

SEQ ID NO: 61712 - protein, 17 aa, Homo sapiens
CAKGSWYYDSSGYYGYW

SEQ ID NO: 61713 - protein, 17 aa, Homo sapiens
CAIHKVLTSSWSPFDSW

SEQ ID NO: 61714 - protein, 22 aa, Homo sapiens
CAKDRLYCGGGSCYQFDPFDAW

SEQ ID NO: 61715 - protein, 21 aa, Homo sapiens
CARKGYSGYEDNFYYYGMDVW

SEQ ID NO: 61716 - protein, 17 aa, Homo sapiens
CAKDHEWLVESCYFDYW

SEQ ID NO: 61717 - protein, 22 aa, Homo sapiens
CARGSAGSSSWYDYYYYGMDVW

SEQ ID NO: 61718 - protein, 22 aa, Homo sapiens
CARGPYSSGWYEFHRPSKFDYW

SEQ ID NO: 61719 - protein, 21 aa, Homo sapiens
CARDAIRWSSWDLHPSPPDYW

SEQ ID NO: 61720 - protein, 16 aa, Homo sapiens
CAKGGSSWWSDRGDYW

SEQ ID NO: 61721 - protein, 20 aa, Homo sapiens
CAHRRPASSPGGAADAFDVW

SEQ ID NO: 61722 - protein, 19 aa, Homo sapiens
CARGLYCSTTNCFGGFDFW

SEQ ID NO: 61723 - protein, 21 aa, Homo sapiens
CATSQITLTRGYHLRGWFDPW

SEQ ID NO: 61724 - protein, 23 aa, Homo sapiens
CARSVPADDYVRGNYRPHYFDLW

SEQ ID NO: 61725 - protein, 22 aa, Homo sapiens
CARDRGKWGWFEGFESGWFDPW

SEQ ID NO: 61726 - protein, 17 aa, Homo sapiens
CARDRVATIFSGWFDPW

SEQ ID NO: 61727 - protein, 15 aa, Homo sapiens
CARECPDPCGGDDYW

SEQ ID NO: 61728 - protein, 18 aa, Homo sapiens
CAHRPPIEGSYYIMFDSW

SEQ ID NO: 61729 - protein, 20 aa, Homo sapiens
CAKVKVFTTHIWYGFYFDYW

SEQ ID NO: 61730 - protein, 22 aa, Homo sapiens
CARGLLPLWFGESPNEYYFDYW

SEQ ID NO: 61731 - protein, 14 aa, Homo sapiens
CARIPAQLMAFDYW

SEQ ID NO: 61732 - protein, 16 aa, Homo sapiens
CARAEYTGYDLHFDYW

SEQ ID NO: 61733 - protein, 14 aa, Homo sapiens
CASSSGYYWGLDYW

SEQ ID NO: 61734 - protein, 17 aa, Homo sapiens
CARLGPVVVRFWYFDLW

SEQ ID NO: 61735 - protein, 30 aa, Homo sapiens
CARDRSLDRLLVSARITMVRGVKEPALDVW

SEQ ID NO: 61736 - protein, 23 aa, Homo sapiens
CAKHKSGWSLLGARVYYWYFDLW

SEQ ID NO: 61737 - protein, 15 aa, Homo sapiens
CATWDDSLTGPVFVF

SEQ ID NO: 61738 - protein, 17 aa, Homo sapiens
CGCSSGWYYYYYGMDVW

SEQ ID NO: 61739 - protein, 19 aa, Homo sapiens
CARDLSEGYYDSSEAFDIW

SEQ ID NO: 61740 - protein, 14 aa, Homo sapiens
CAYMPRQQLSLDYW

SEQ ID NO: 61741 - protein, 21 aa, Homo sapiens
CAKSFKNSRDSQDWLYYLEYW

SEQ ID NO: 61742 - protein, 16 aa, Homo sapiens
CAHRRLPMISGYFDYW

SEQ ID NO: 61743 - protein, 21 aa, Homo sapiens
CAREQWGVDIVATIPSYFDYW

SEQ ID NO: 61744 - protein, 15 aa, Homo sapiens
CVNLPGSAGYYYDYW

SEQ ID NO: 61745 - protein, 22 aa, Homo sapiens
CARVADWFGYSDHYYFYGMDVW

SEQ ID NO: 61746 - protein, 17 aa, Homo sapiens
CARPAGGDNWGDAFDIW

SEQ ID NO: 61747 - protein, 14 aa, Homo sapiens
CASELLPGYSFDYW

SEQ ID NO: 61748 - protein, 27 aa, Homo sapiens
CARELGEPYYYDSFSSNYYYYYGMDVW

SEQ ID NO: 61749 - protein, 18 aa, Homo sapiens
CARMRWGYGGNSQYFDFW

SEQ ID NO: 61750 - protein, 24 aa, Homo sapiens
CARQGFPFYSSGYYPPETYYFDYW

SEQ ID NO: 61751 - protein, 18 aa, Homo sapiens
CARDLFDDYGDLDAFDIW

SEQ ID NO: 61752 - protein, 20 aa, Homo sapiens
CARSPNYYDSSGYYPFYDYW

SEQ ID NO: 61753 - protein, 22 aa, Homo sapiens
CARDRDNWNDFFPQWADAFDIW

SEQ ID NO: 61754 - protein, 18 aa, Homo sapiens
CAHRVSVIWEGAGGFDYW

SEQ ID NO: 61755 - protein, 18 aa, Homo sapiens
CAKVPGRITMVRGGLDYW

SEQ ID NO: 61756 - protein, 21 aa, Homo sapiens
CARHGLVSGQWLVHSGYFDYW

SEQ ID NO: 61757 - protein, 17 aa, Homo sapiens
CASPRGSGWSFGPFDYW

SEQ ID NO: 61758 - protein, 16 aa, Homo sapiens
CARRGTSESYYSFDFW

SEQ ID NO: 61759 - protein, 17 aa, Homo sapiens
CARDRWSGGSRGWFDSW

SEQ ID NO: 61760 - protein, 28 aa, Homo sapiens
CLRAEDTAVYYCARGGIAVAVLPTLDYW

SEQ ID NO: 61761 - protein, 21 aa, Homo sapiens
CAKGTLVWNKYDETSDAFDVW

SEQ ID NO: 61762 - protein, 23 aa, Homo sapiens
CAREKDYYDILTGYYANWIIDYW

SEQ ID NO: 61763 - protein, 16 aa, Homo sapiens
CAKGLGSGIGGTYDYW

SEQ ID NO: 61764 - protein, 19 aa, Homo sapiens
CAKDSQAGSYYADDAFDIW

SEQ ID NO: 61765 - protein, 19 aa, Homo sapiens
CARHKREMATIHEGYFDLW

SEQ ID NO: 61766 - protein, 22 aa, Homo sapiens
CARDVATVTIPPGEFEYYLDYW

SEQ ID NO: 61767 - protein, 22 aa, Homo sapiens
CARALKRHTTSWYSQIDTFDVW

SEQ ID NO: 61768 - protein, 27 aa, Homo sapiens
CAREKDDYVWGSYRYWGEPRPYYFDYW

SEQ ID NO: 61769 - protein, 20 aa, Homo sapiens
CASGPGYSSSWYRYWYFDLW

SEQ ID NO: 61770 - protein, 25 aa, Homo sapiens
CATYGVYYDILTGYYGLAAEYFQHW

SEQ ID NO: 61771 - protein, 22 aa, Homo sapiens
CARHVRGHYYGSGKKMFYFDFW

SEQ ID NO: 61772 - protein, 19 aa, Homo sapiens
CARLTDIVATITYGTFDYW

SEQ ID NO: 61773 - protein, 22 aa, Homo sapiens
CAKDAPGYYDSSGYYNGAFDIW

SEQ ID NO: 61774 - protein, 18 aa, Homo sapiens
CARASVGQWLVLGWFDPW

SEQ ID NO: 61775 - protein, 15 aa, Homo sapiens
CARSLLLILGGIDYW

SEQ ID NO: 61776 - protein, 25 aa, Homo sapiens
CARGELRYFDWLLSSSPPDWYFDLW

SEQ ID NO: 61777 - protein, 20 aa, Homo sapiens
CARCLDGRFGGYYGYWFDSW

SEQ ID NO: 61778 - protein, 15 aa, Homo sapiens
CARHSRGGSIYFDYW

SEQ ID NO: 61779 - protein, 17 aa, Homo sapiens
CARGGYSAYDKYAFDFW

SEQ ID NO: 61780 - protein, 18 aa, Homo sapiens
CASEGGGGYSYGWAFDIW

SEQ ID NO: 61781 - protein, 13 aa, Homo sapiens
CARDPYSSGFEYW

SEQ ID NO: 61782 - protein, 20 aa, Homo sapiens
CARDIRYNWNDEYYYGMDVW

SEQ ID NO: 61783 - protein, 21 aa, Homo sapiens
CAKDGVPMGSTMSVPRGFDVW

SEQ ID NO: 61784 - protein, 18 aa, Homo sapiens
CAGGSTSGSYSYDPFDMW

SEQ ID NO: 61785 - protein, 24 aa, Homo sapiens
CARLHVLRYFDWLVPQTLYYFDYW

SEQ ID NO: 61786 - protein, 22 aa, Homo sapiens
CARGMITFGGVIAYYYYGMDVW

SEQ ID NO: 61787 - protein, 17 aa, Homo sapiens
CAKGDGGGYYGSYIDSW

SEQ ID NO: 61788 - protein, 25 aa, Homo sapiens
CARDKDDSSGYYYFRGKPYWYFDLW

SEQ ID NO: 61789 - protein, 25 aa, Homo sapiens
CTTVATIESDYGDYATLTPYYFDYW

SEQ ID NO: 61790 - protein, 25 aa, Homo sapiens
CARDQVDIVATIGGERNYYYGMDVW

SEQ ID NO: 61791 - protein, 21 aa, Homo sapiens
CAREPPNTGYHRSTRGYNDYW

SEQ ID NO: 61792 - protein, 16 aa, Homo sapiens
CAKGRMATIFAAVDIW

SEQ ID NO: 61793 - protein, 18 aa, Homo sapiens
CARGGGLWFGESQPFDSW

SEQ ID NO: 61794 - protein, 18 aa, Homo sapiens
CARLLLMFGELTNPFDYW

SEQ ID NO: 61795 - protein, 17 aa, Homo sapiens
CAKDGPRLVFSYYFDYW

SEQ ID NO: 61796 - protein, 17 aa, Homo sapiens
CARPSATSLFNWYFDLW

SEQ ID NO: 61797 - protein, 16 aa, Homo sapiens
CARGSSIGFKMTFVYW

SEQ ID NO: 61798 - protein, 19 aa, Homo sapiens
CARGGPPVAGFYYYGMDVW

SEQ ID NO: 61799 - protein, 21 aa, Homo sapiens
CARSTSRGHSGDEYVPRLDYW

SEQ ID NO: 61800 - protein, 19 aa, Homo sapiens
CARGVRGWLQFRGYYFDYW

SEQ ID NO: 61801 - protein, 17 aa, Homo sapiens
CAKTPITMIVEHAFDIW

SEQ ID NO: 61802 - protein, 20 aa, Homo sapiens
CARVGDTSGYPYLGESFDSW

SEQ ID NO: 61803 - protein, 20 aa, Homo sapiens
CARDGFSHIVGATMDAFDIW

SEQ ID NO: 61804 - protein, 18 aa, Homo sapiens
CARWIGKTPYYYYGMDVW

SEQ ID NO: 61805 - protein, 26 aa, Homo sapiens
CARDEPSSSWYLTLGPIYYYYGMDVW

SEQ ID NO: 61806 - protein, 16 aa, Homo sapiens
CARGLTMLRGPFFDYW

SEQ ID NO: 61807 - protein, 19 aa, Homo sapiens
CARSIWFGELFPSNWFDPW

SEQ ID NO: 61808 - protein, 16 aa, Homo sapiens
CAKEGLQGGWYYFDYW

SEQ ID NO: 61809 - protein, 17 aa, Homo sapiens
CARDGSVGGSYLYLDYW

SEQ ID NO: 61810 - protein, 16 aa, Homo sapiens
CAKAFGGSYYNWFDPW

SEQ ID NO: 61811 - protein, 22 aa, Homo sapiens
CARGPTEEYYGSGSYLDWFDPW

SEQ ID NO: 61812 - protein, 24 aa, Homo sapiens
CARDSDYGDYVLTLGYYYYGMDVW

SEQ ID NO: 61813 - protein, 19 aa, Homo sapiens
CARDKYYGSGSIANWFDPW

SEQ ID NO: 61814 - protein, 26 aa, Homo sapiens
CAKAGMVDTAMVNPSIWGYYYGMDVW

SEQ ID NO: 61815 - protein, 24 aa, Homo sapiens
CAKEFEYYYDSSGYYSRWDYFDYW

SEQ ID NO: 61816 - protein, 19 aa, Homo sapiens
CARDRTNYYDSSGWAFDIW

SEQ ID NO: 61817 - protein, 16 aa, Homo sapiens
CARGRGFDWLFPLDYW

SEQ ID NO: 61818 - protein, 16 aa, Homo sapiens
CASCNSGSYYCPFDYW

SEQ ID NO: 61819 - protein, 17 aa, Homo sapiens
CARQGEVGSRWYWFDAW

SEQ ID NO: 61820 - protein, 17 aa, Homo sapiens
CVKDGRGWEEPHYFDYW

SEQ ID NO: 61821 - protein, 23 aa, Homo sapiens
CAREDYCSGGSCYWSPNYYFDYW

SEQ ID NO: 61822 - protein, 20 aa, Homo sapiens
CAMGRYSYGYWHYYYGMDVW

SEQ ID NO: 61823 - protein, 19 aa, Homo sapiens
CAGDLSGSYWGEQGRFDPW

SEQ ID NO: 61824 - protein, 18 aa, Homo sapiens
CARLRTRGGNPYDAFDIW

SEQ ID NO: 61825 - protein, 18 aa, Homo sapiens
CARDEPPMEYYYYGMDVW

SEQ ID NO: 61826 - protein, 22 aa, Homo sapiens
CARDGRGVGASWRYYYYGMDVW

SEQ ID NO: 61827 - protein, 20 aa, Homo sapiens
CAKDYYDKDENYYYYGMDVW

SEQ ID NO: 61828 - protein, 16 aa, Homo sapiens
CARDLPGETIAALDYW

SEQ ID NO: 61829 - protein, 25 aa, Homo sapiens
CAKDSSPYYDYVWGSYCYTGGFDDW

SEQ ID NO: 61830 - protein, 16 aa, Homo sapiens
CAKGGWYESTMEPDYW

SEQ ID NO: 61831 - protein, 22 aa, Homo sapiens
CARSYWRRGVIINYYYYGMDVW

SEQ ID NO: 61832 - protein, 19 aa, Homo sapiens
CARAGWIAVAGTVGPFDYW

SEQ ID NO: 61833 - protein, 19 aa, Homo sapiens
CARHDYSSGWYSEGYFDYW

SEQ ID NO: 61834 - protein, 16 aa, Homo sapiens
CATLYHDYGDYLFDYW

SEQ ID NO: 61835 - protein, 17 aa, Homo sapiens
CAKMVRGVSTGNYFDYW

SEQ ID NO: 61836 - protein, 27 aa, Homo sapiens
CARDKQGDRISMVRGVITYYYYGMDVW

SEQ ID NO: 61837 - protein, 16 aa, Homo sapiens
CAKDLGRYYDNPLDSW

SEQ ID NO: 61838 - protein, 21 aa, Homo sapiens
CARDRIPGIAVAGPHWYFDLW

SEQ ID NO: 61839 - protein, 14 aa, Homo sapiens
CVTYSLWLVHFNYW

SEQ ID NO: 61840 - protein, 23 aa, Homo sapiens
CAKGGIPYCSSTSCYVGGYFDYW

SEQ ID NO: 61841 - protein, 13 aa, Homo sapiens
CASITGYGSTDYW

SEQ ID NO: 61842 - protein, 18 aa, Homo sapiens
CARHGQAGWGEAGYFDYW

SEQ ID NO: 61843 - protein, 23 aa, Homo sapiens
CARSGITQDYVWGSYRYNWFDPW

SEQ ID NO: 61844 - protein, 21 aa, Homo sapiens
CARGGGYSGYDYQDSDAFDIW

SEQ ID NO: 61845 - protein, 22 aa, Homo sapiens
CARETGGGLWFGELLWGRVDYW

SEQ ID NO: 61846 - protein, 11 aa, Homo sapiens
CTGPTCHLDYW

SEQ ID NO: 61847 - protein, 20 aa, Homo sapiens
CARNGMTTVTKYYYYGMDVW

SEQ ID NO: 61848 - protein, 21 aa, Homo sapiens
CARDGLTWIQLQYYYYGMDVW

SEQ ID NO: 61849 - protein, 17 aa, Homo sapiens
CAHRGVRGVITNGFDYW

SEQ ID NO: 61850 - protein, 23 aa, Homo sapiens
CARDLGITMVRGVIINPDYFDYW

SEQ ID NO: 61851 - protein, 25 aa, Homo sapiens
CAKDLYCSSTSCYRIRYYYYGMDVW

SEQ ID NO: 61852 - protein, 21 aa, Homo sapiens
CARDLPDSSGYYYEGGAFDIW

SEQ ID NO: 61853 - protein, 14 aa, Homo sapiens
CARDPGGSRGFDHW

SEQ ID NO: 61854 - protein, 23 aa, Homo sapiens
CARGRYGGITMIVVVITYYFDYW

SEQ ID NO: 61855 - protein, 15 aa, Homo sapiens
CARAGKPGIAAADYW

SEQ ID NO: 61856 - protein, 16 aa, Homo sapiens
CARLTPVAGMWYFDYW

SEQ ID NO: 61857 - protein, 16 aa, Homo sapiens
CATTTPYGSVNWFDPW

SEQ ID NO: 61858 - protein, 22 aa, Homo sapiens
CAREFRSDTSRYYFLESYFDSW

SEQ ID NO: 61859 - protein, 18 aa, Homo sapiens
CARDLDTAMVTGSRFDYW

SEQ ID NO: 61860 - protein, 13 aa, Homo sapiens
CARSYGDYTFSYW

SEQ ID NO: 61861 - protein, 22 aa, Homo sapiens
CARQPPRQLYSQFHHEYYFDYW

SEQ ID NO: 61862 - protein, 19 aa, Homo sapiens
CATATGFCTATSCYPFDHW

SEQ ID NO: 61863 - protein, 18 aa, Homo sapiens
CAREYCTGPRCHYYFDYW

SEQ ID NO: 61864 - protein, 15 aa, Homo sapiens
CARASREEADGMDVW

SEQ ID NO: 61865 - protein, 13 aa, Homo sapiens
CFSFDRNNDVGVF

SEQ ID NO: 61866 - protein, 27 aa, Homo sapiens
CARADSGYYDILTGWTRFHAANQFDYW

SEQ ID NO: 61867 - protein, 18 aa, Homo sapiens
CARGGAAAAGTRSWFDPW

SEQ ID NO: 61868 - protein, 18 aa, Homo sapiens
CVRSDRYCSSYRCYGDHW

SEQ ID NO: 61869 - protein, 15 aa, Homo sapiens
CARDDIVTTIANDYW

SEQ ID NO: 61870 - protein, 28 aa, Homo sapiens
CAKDSPGRDDYGDYGRSDYYYYYGMDVW

SEQ ID NO: 61871 - protein, 22 aa, Homo sapiens
CARLRILKGYYYDSSGYYYDYW

SEQ ID NO: 61872 - protein, 20 aa, Homo sapiens
CARYPYVLLWFGESPYFDYW

SEQ ID NO: 61873 - protein, 16 aa, Homo sapiens
CARRRRTMSFNTFDVW

SEQ ID NO: 61874 - protein, 20 aa, Homo sapiens
CAHRPLLRAAAGLAGSFDYW

SEQ ID NO: 61875 - protein, 16 aa, Homo sapiens
CARCPKRLMCPLTDYW

SEQ ID NO: 61876 - protein, 23 aa, Homo sapiens
CARLGFGELLGYNYYYYYGMDVW

SEQ ID NO: 61877 - protein, 21 aa, Homo sapiens
CARSPYPTMVRGPNPNWFDPW

SEQ ID NO: 61878 - protein, 21 aa, Homo sapiens
CARSTYYYGNNGYRYLYFDLW

SEQ ID NO: 61879 - protein, 18 aa, Homo sapiens
CAKDFADYGDYVDYFDYW

SEQ ID NO: 61880 - protein, 22 aa, Homo sapiens
CARDQMPYSSSHYYYYYGMDVW

SEQ ID NO: 61881 - protein, 24 aa, Homo sapiens
CVRDVRPLYCSGGSCYYYYGMDVW

SEQ ID NO: 61882 - protein, 21 aa, Homo sapiens
CARGPRGLWPQSYYYYGMDVW

SEQ ID NO: 61883 - protein, 26 aa, Homo sapiens
CAKDGTPGYSSGWGFTLQIAPFFDYW

SEQ ID NO: 61884 - protein, 20 aa, Homo sapiens
CAKIKRPMIVVVIPDVFDYW

SEQ ID NO: 61885 - protein, 17 aa, Homo sapiens
CARGGTRYSGSSLPDYW

SEQ ID NO: 61886 - protein, 20 aa, Homo sapiens
CARIRGIGPYYYDSSGYDYW

SEQ ID NO: 61887 - protein, 14 aa, Homo sapiens
CAKDNSDFDFFEYW

SEQ ID NO: 61888 - protein, 16 aa, Homo sapiens
CAHSYNWPPEAYFDYW

SEQ ID NO: 61889 - protein, 23 aa, Homo sapiens
CATAPAMVRGVNGYYYYYGMDVW

SEQ ID NO: 61890 - protein, 17 aa, Homo sapiens
CGRDYYEDSGYYRIDYW

SEQ ID NO: 61891 - protein, 16 aa, Homo sapiens
CATGYSSSNDVAFDIW

SEQ ID NO: 61892 - protein, 21 aa, Homo sapiens
CAKTTSRGYSYSLYYYGMDVW

SEQ ID NO: 61893 - protein, 23 aa, Homo sapiens
CAKDISIGGNSPSEYYYYGMDVW

SEQ ID NO: 61894 - protein, 18 aa, Homo sapiens
CAKDFLVYCDINCYSDFW

SEQ ID NO: 61895 - protein, 17 aa, Homo sapiens
CSRHVIRFASLYYFDLW

SEQ ID NO: 61896 - protein, 17 aa, Homo sapiens
CAKGAEEFLVGATLDYW

SEQ ID NO: 61897 - protein, 16 aa, Homo sapiens
CAHRRHFGDGAGFDPW

SEQ ID NO: 61898 - protein, 23 aa, Homo sapiens
CALSLPYDGSGEYYGKVEYFHHW

SEQ ID NO: 61899 - protein, 18 aa, Homo sapiens
CARDGALRYFDWDYFDYW

SEQ ID NO: 61900 - protein, 25 aa, Homo sapiens
CVRDIKSVVAGTWWSPRAPIFIDYW

SEQ ID NO: 61901 - protein, 13 aa, Homo sapiens
CARVPGYSKFDPW

SEQ ID NO: 61902 - protein, 21 aa, Homo sapiens
CARDQGVYSHGTYYYYGMDVW

SEQ ID NO: 61903 - protein, 20 aa, Homo sapiens
CARYGMATRDYYYYYGMDVW

SEQ ID NO: 61904 - protein, 18 aa, Homo sapiens
CARVLGPAEAIDRRLDYW

SEQ ID NO: 61905 - protein, 14 aa, Homo sapiens
CAREAAGTVVFDYW

SEQ ID NO: 61906 - protein, 15 aa, Homo sapiens
CALYSGSYRFIFDYW

SEQ ID NO: 61907 - protein, 16 aa, Homo sapiens
CAHRRFGLAVAGFDYW

SEQ ID NO: 61908 - protein, 17 aa, Homo sapiens
CASPKTTGSYGFCFDYW

SEQ ID NO: 61909 - protein, 14 aa, Homo sapiens
CASLYSGSYTLDYW

SEQ ID NO: 61910 - protein, 19 aa, Homo sapiens
CARGSGSGWYNEEEYLRYW

SEQ ID NO: 61911 - protein, 24 aa, Homo sapiens
CARALRGYSGYDYFGVRGGWFDPW

SEQ ID NO: 61912 - protein, 18 aa, Homo sapiens
CARDRNFWYYYDTRYDYW

SEQ ID NO: 61913 - protein, 15 aa, Homo sapiens
CARDDWRWGSYFNYW

SEQ ID NO: 61914 - protein, 26 aa, Homo sapiens
CARDLWTTVGPQSLYSHYYYYGMDVW

SEQ ID NO: 61915 - protein, 22 aa, Homo sapiens
CVKDKLLWFGESVPALNAFDIW

SEQ ID NO: 61916 - protein, 16 aa, Homo sapiens
CARTGATSVGYYFDYW

SEQ ID NO: 61917 - protein, 24 aa, Homo sapiens
CARDLPQQLVQLERWYYYYGMDVW

SEQ ID NO: 61918 - protein, 22 aa, Homo sapiens
CARDESWTNYYDSSWGYYFDYW

SEQ ID NO: 61919 - protein, 22 aa, Homo sapiens
CVQRGYDILTGYSLSENWFDPW

SEQ ID NO: 61920 - protein, 19 aa, Homo sapiens
CAREGEGSIAVALDGMDVW

SEQ ID NO: 61921 - protein, 17 aa, Homo sapiens
CARGTGTLPRAGSADYW

SEQ ID NO: 61922 - protein, 17 aa, Homo sapiens
CARGSVWFGAPGWFDPW

SEQ ID NO: 61923 - protein, 19 aa, Homo sapiens
CARGVSQPVAAAGTNFDPW

SEQ ID NO: 61924 - protein, 21 aa, Homo sapiens
CARESLWFGELLSGRGWFDPW

SEQ ID NO: 61925 - protein, 21 aa, Homo sapiens
CARDVPGKGVPSWSYLDFDYW

SEQ ID NO: 61926 - protein, 24 aa, Homo sapiens
CAKDSRIAVAGTGIEIYYYGMDVW

SEQ ID NO: 61927 - protein, 14 aa, Homo sapiens
CSSRDSSGDYHVLF

SEQ ID NO: 61928 - protein, 15 aa, Homo sapiens
CARHDVGGWVRFDCW

SEQ ID NO: 61929 - protein, 13 aa, Homo sapiens
CAKVSDVFHLDYW

SEQ ID NO: 61930 - protein, 17 aa, Homo sapiens
CARDGSAAAGTVWFDSW

SEQ ID NO: 61931 - protein, 31 aa, Homo sapiens
CARDRDCSGGSCYFSTVGKLWATYYYGMDVW

SEQ ID NO: 61932 - protein, 17 aa, Homo sapiens
CARDLDLHWPWGAFDIW

SEQ ID NO: 61933 - protein, 22 aa, Homo sapiens
CAHRRPNYVWGTYRESGAFDIW

SEQ ID NO: 61934 - protein, 25 aa, Homo sapiens
CAKAQGDGYSSSWSRRDYYYGMDVW

SEQ ID NO: 61935 - protein, 22 aa, Homo sapiens
CAREPYYYDSSGYYYYYGMDVW

SEQ ID NO: 61936 - protein, 27 aa, Homo sapiens
CARGIRNKNYSDSAGYWKPQGRTFDYW

SEQ ID NO: 61937 - protein, 18 aa, Homo sapiens
CAREGYSGYPLNGPFDYW

SEQ ID NO: 61938 - protein, 22 aa, Homo sapiens
CAHVPPPILLWFGERLGYFDYW

SEQ ID NO: 61939 - protein, 17 aa, Homo sapiens
CARDTFGYGDSPLFGYW

SEQ ID NO: 61940 - protein, 26 aa, Homo sapiens
CARGVPNYDSSGYPVGRYYYYGMDVW

SEQ ID NO: 61941 - protein, 16 aa, Homo sapiens
CVKRDSGDFLGFFDHW

SEQ ID NO: 61942 - protein, 21 aa, Homo sapiens
CAKDRGPFDRSGFYYGLFDYW

SEQ ID NO: 61943 - protein, 20 aa, Homo sapiens
CARHEFLHYGSGSYSPFDYW

SEQ ID NO: 61944 - protein, 18 aa, Homo sapiens
CAKSNNRVAAAGNYFDYW

SEQ ID NO: 61945 - protein, 19 aa, Homo sapiens
CVKDMIEGGPYSYGLFDYW

SEQ ID NO: 61946 - protein, 16 aa, Homo sapiens
CAKKSPIGDYFWFDPW

SEQ ID NO: 61947 - protein, 14 aa, Homo sapiens
CVSVPAAIWSFDYW

SEQ ID NO: 61948 - protein, 23 aa, Homo sapiens
CARPGSPPHYYDSSGYLGAFDIW

SEQ ID NO: 61949 - protein, 23 aa, Homo sapiens
CARHWGGNYGDYGPEIYWYFDLW

SEQ ID NO: 61950 - protein, 21 aa, Homo sapiens
CARRPIDYSSSGYLLDAFDVW

SEQ ID NO: 61951 - protein, 25 aa, Homo sapiens
CARDQLQKYSGYDNPLWYYYGMDVW

SEQ ID NO: 61952 - protein, 17 aa, Homo sapiens
CAKSDTAMAPYNWFDPW

SEQ ID NO: 61953 - protein, 20 aa, Homo sapiens
CAKDIGVVIGYYYYYGMDVW

SEQ ID NO: 61954 - protein, 19 aa, Homo sapiens
CAGTSMVRDNLMRSWFDPW

SEQ ID NO: 61955 - protein, 18 aa, Homo sapiens
CARHLRWDTVTSLSFDYW

SEQ ID NO: 61956 - protein, 20 aa, Homo sapiens
CARSTILVPAAMRSDGLDVW

SEQ ID NO: 61957 - protein, 23 aa, Homo sapiens
CARDRLMVRGDPYYYYYYGMDVW

SEQ ID NO: 61958 - protein, 19 aa, Homo sapiens
CVRGVSSGWFPPLRDFEYW

SEQ ID NO: 61959 - protein, 21 aa, Homo sapiens
CVRSLLPYYYDSVGRQGIDYW

SEQ ID NO: 61960 - protein, 15 aa, Homo sapiens
CATKRGLWFGVIDYW

SEQ ID NO: 61961 - protein, 18 aa, Homo sapiens
CARHYSLVLVHELYFDYW

SEQ ID NO: 61962 - protein, 17 aa, Homo sapiens
CARTREEPNYGDYEDYW

SEQ ID NO: 61963 - protein, 16 aa, Homo sapiens
CAREVGEMATNSFDYW

SEQ ID NO: 61964 - protein, 20 aa, Homo sapiens
CAMSGYYDSSGYYFLDLDYW

SEQ ID NO: 61965 - protein, 18 aa, Homo sapiens
CAKSPLPTELSSDYFDYW

SEQ ID NO: 61966 - protein, 22 aa, Homo sapiens
CARDMITFGGVIAVGHDAFDIW

SEQ ID NO: 61967 - protein, 25 aa, Homo sapiens
CARDRYRRNYDILTGSLEGQAYDYW

SEQ ID NO: 61968 - protein, 24 aa, Homo sapiens
CAIGILTCGGDCFSPPYYYAMDVW

SEQ ID NO: 61969 - protein, 16 aa, Homo sapiens
CARFDYDGHHDAFDVW

SEQ ID NO: 61970 - protein, 19 aa, Homo sapiens
CARATTLGVTYYYYGMDVW

SEQ ID NO: 61971 - protein, 23 aa, Homo sapiens
CARDPTDTAMVHSYYYYYGMDVW

SEQ ID NO: 61972 - protein, 20 aa, Homo sapiens
CARWGGYSSSWYVYYGMDVW

SEQ ID NO: 61973 - protein, 19 aa, Homo sapiens
CARTYCSGGSSCYVGFDYW

SEQ ID NO: 61974 - protein, 21 aa, Homo sapiens
CARSPIYDILTGYATEYFQHW

SEQ ID NO: 61975 - protein, 17 aa, Homo sapiens
CARDMSGAYGDYAFDLW

SEQ ID NO: 61976 - protein, 16 aa, Homo sapiens
CARGLMATTLWAFDYW

SEQ ID NO: 61977 - protein, 17 aa, Homo sapiens
CARPARGYSYGYASDYW

SEQ ID NO: 61978 - protein, 22 aa, Homo sapiens
CARDGELLWFGELRDTNWFDPW

SEQ ID NO: 61979 - protein, 21 aa, Homo sapiens
CARRFGIHYAPTGDYGWFDPW

SEQ ID NO: 61980 - protein, 24 aa, Homo sapiens
CARGAKLRPMALYNYYYYYGMDVW

SEQ ID NO: 61981 - protein, 16 aa, Homo sapiens
CTTDSADYGDSYFDYW

SEQ ID NO: 61982 - protein, 23 aa, Homo sapiens
CARDRELPSGSYFHYYYYGMDVW

SEQ ID NO: 61983 - protein, 23 aa, Homo sapiens
CARVTNDYVWGSYRHDPVSFDYW

SEQ ID NO: 61984 - protein, 18 aa, Homo sapiens
CASSRPPHYGSGSYYDYW

SEQ ID NO: 61985 - protein, 15 aa, Homo sapiens
CARTVVVTAPLSDYW

SEQ ID NO: 61986 - protein, 15 aa, Homo sapiens
CYTDLYGDPLPFDYW

SEQ ID NO: 61987 - protein, 23 aa, Homo sapiens
CARDLWGIQLWLRADYYYGMDVW

SEQ ID NO: 61988 - protein, 17 aa, Homo sapiens
CARSPPSYSSSFSFDHW

SEQ ID NO: 61989 - protein, 13 aa, Homo sapiens
CAKFSSIRGRDYW

SEQ ID NO: 61990 - protein, 25 aa, Homo sapiens
CAKEGTLRSSSWYWMSQVEYYFDYW

SEQ ID NO: 61991 - protein, 22 aa, Homo sapiens
CARAAIYDILTGYYKYYGMDVW

SEQ ID NO: 61992 - protein, 16 aa, Homo sapiens
CARALVVVTYNWFDPW

SEQ ID NO: 61993 - protein, 22 aa, Homo sapiens
CTRAIPWYSSGWYWSETYFDYW

SEQ ID NO: 61994 - protein, 15 aa, Homo sapiens
CATGGGDGYTLNDYW

SEQ ID NO: 61995 - protein, 18 aa, Homo sapiens
CAKDMGSGNWDQYYFDYW

SEQ ID NO: 61996 - protein, 19 aa, Homo sapiens
CARSGWSTRSRKSNWFDPW

SEQ ID NO: 61997 - protein, 17 aa, Homo sapiens
CAKEGPYMEWLSYFDRW

SEQ ID NO: 61998 - protein, 19 aa, Homo sapiens
CAKDMGYNSGWSKKGFDSW

SEQ ID NO: 61999 - protein, 20 aa, Homo sapiens
CARDLQVREVGSGSYPSDYW

SEQ ID NO: 62000 - protein, 20 aa, Homo sapiens
CARTTLYDYVWGSEDAFDIW

SEQ ID NO: 62001 - protein, 24 aa, Homo sapiens
CARDKDNTREYSYGYLYYYGMDVW

SEQ ID NO: 62002 - protein, 18 aa, Homo sapiens
CVKDPGGSDYGDYYFDYW

SEQ ID NO: 62003 - protein, 20 aa, Homo sapiens
CAREMDGYNSLYYYYGMDVW

SEQ ID NO: 62004 - protein, 18 aa, Homo sapiens
CAKASGWFGELLSCFDYW

SEQ ID NO: 62005 - protein, 17 aa, Homo sapiens
CARDMDMIVVGGSWDYW

SEQ ID NO: 62006 - protein, 20 aa, Homo sapiens
CAHRQSDSSGYYTLNWFDPW

SEQ ID NO: 62007 - protein, 16 aa, Homo sapiens
CARNSGYDLNDAFDIW

SEQ ID NO: 62008 - protein, 20 aa, Homo sapiens
CAKVSGTFCGSTSCYPLDYW

SEQ ID NO: 62009 - protein, 20 aa, Homo sapiens
CARHNLPQWLRSLQPHFDYW

SEQ ID NO: 62010 - protein, 20 aa, Homo sapiens
CARDSFAPVTGTISWSFDFW

SEQ ID NO: 62011 - protein, 26 aa, Homo sapiens
CARANPYYDYVWGSYRYEVPGVFDYW

SEQ ID NO: 62012 - protein, 19 aa, Homo sapiens
CARDMRDYYGDYSGYFDLW

SEQ ID NO: 62013 - protein, 17 aa, Homo sapiens
CARSMNSNSLHDVFDMW

SEQ ID NO: 62014 - protein, 24 aa, Homo sapiens
CAREPPPYYDILTGYLLTHYFDYW

SEQ ID NO: 62015 - protein, 17 aa, Homo sapiens
CAKDWAAAGSLDAFDIW

SEQ ID NO: 62016 - protein, 16 aa, Homo sapiens
CAREGGGWIPDWFDPW

SEQ ID NO: 62017 - protein, 21 aa, Homo sapiens
CTRDQIITMVRGVIDLGFDPW

SEQ ID NO: 62018 - protein, 15 aa, Homo sapiens
CARAPNANTNWVDPW

SEQ ID NO: 62019 - protein, 21 aa, Homo sapiens
CTTLTGYTMSWFGRRDAYDVW

SEQ ID NO: 62020 - protein, 23 aa, Homo sapiens
CARGGVLWFGPRPLYYYYGMDVW

SEQ ID NO: 62021 - protein, 19 aa, Homo sapiens
CAILSGHSGTDYVNYFDDW

SEQ ID NO: 62022 - protein, 22 aa, Homo sapiens
CSTVRYCTRTSCEAGVDWFDPW

SEQ ID NO: 62023 - protein, 20 aa, Homo sapiens
CARHWSPNIWFGELTWFDPW

SEQ ID NO: 62024 - protein, 17 aa, Homo sapiens
CAKDSGPKAVAGEFDYW

SEQ ID NO: 62025 - protein, 20 aa, Homo sapiens
CAYSSSWYGNYYYYYGMDVW

SEQ ID NO: 62026 - protein, 22 aa, Homo sapiens
CARDTAATVTAYYYYYYGMDVW

SEQ ID NO: 62027 - protein, 20 aa, Homo sapiens
CARDRETTVVTPTAHWFDPW

SEQ ID NO: 62028 - protein, 20 aa, Homo sapiens
CASVNYYESSGYYGDWFDPW

SEQ ID NO: 62029 - protein, 22 aa, Homo sapiens
CTTEVGEEYYYDSSDNMSIDYW

SEQ ID NO: 62030 - protein, 18 aa, Homo sapiens
CAKHQLTGRSYSDAFHIW

SEQ ID NO: 62031 - protein, 16 aa, Homo sapiens
CVRGDGGHSYGSIDYW

SEQ ID NO: 62032 - protein, 19 aa, Homo sapiens
CGRDPEQWELHEGVYMDVW

SEQ ID NO: 62033 - protein, 20 aa, Homo sapiens
CAHRPPLWISSSSWYYFDYW

SEQ ID NO: 62034 - protein, 21 aa, Homo sapiens
CARGLWVSGYSYGKQYYFDYW

SEQ ID NO: 62035 - protein, 17 aa, Homo sapiens
CATGCSGGGCNSPFDYW

SEQ ID NO: 62036 - protein, 18 aa, Homo sapiens
CARDRRPYDSRSDGLDIW

SEQ ID NO: 62037 - protein, 15 aa, Homo sapiens
CARLRVRAIDAFDIW

SEQ ID NO: 62038 - protein, 13 aa, Homo sapiens
CTRDSPAARGDYW

SEQ ID NO: 62039 - protein, 24 aa, Homo sapiens
CAKDSNLYCGDTSCLLQGVFFDYW

SEQ ID NO: 62040 - protein, 17 aa, Homo sapiens
CARARGRILGTIYVDHW

SEQ ID NO: 62041 - protein, 19 aa, Homo sapiens
CAKDRMITFGGVIGPFDYW

SEQ ID NO: 62042 - protein, 20 aa, Homo sapiens
CAKREESCSGWYRPIWFDPW

SEQ ID NO: 62043 - protein, 25 aa, Homo sapiens
CAKDLYIVDTAMVNGYYYYYGMDVW

SEQ ID NO: 62044 - protein, 15 aa, Homo sapiens
CARAWGGANPNFDYW

SEQ ID NO: 62045 - protein, 24 aa, Homo sapiens
CARLTWIQLPGERVLYYYYGMDVW

SEQ ID NO: 62046 - protein, 20 aa, Homo sapiens
CAKSMVRGVIITERDAFDIW

SEQ ID NO: 62047 - protein, 18 aa, Homo sapiens
CVRERLYFNRPMRFFDYW

SEQ ID NO: 62048 - protein, 16 aa, Homo sapiens
CARGGPYIVRNAFDIW

SEQ ID NO: 62049 - protein, 18 aa, Homo sapiens
CAKPYWPYGDYSYYFDYW

SEQ ID NO: 62050 - protein, 18 aa, Homo sapiens
CTRVRHSSGWYYDAFDIW

SEQ ID NO: 62051 - protein, 22 aa, Homo sapiens
CARVGEMGLRLWFGEVHWFDPW

SEQ ID NO: 62052 - protein, 17 aa, Homo sapiens
CAKDIGGSGTYYSFDYW

SEQ ID NO: 62053 - protein, 17 aa, Homo sapiens
CAKPELGWLHFDAFDIW

SEQ ID NO: 62054 - protein, 22 aa, Homo sapiens
CARGRRVSTVTRLYYYYGMDVW

SEQ ID NO: 62055 - protein, 18 aa, Homo sapiens
CAHSGTMIVVARGAFDIW

SEQ ID NO: 62056 - protein, 23 aa, Homo sapiens
CVRDKGYSTSQYEIESHDAFDVW

SEQ ID NO: 62057 - protein, 16 aa, Homo sapiens
CAHRQTSISGSYFDYW

SEQ ID NO: 62058 - protein, 39 aa, Homo sapiens
CTAYLQWSSLKASDTAIYFCARGGYDIFTGYYKRPFDYW

SEQ ID NO: 62059 - protein, 24 aa, Homo sapiens
CARDPPQRIAVAGPNYYYYGMDVW

SEQ ID NO: 62060 - protein, 12 aa, Homo sapiens
CYCGGDWYFDLW

SEQ ID NO: 62061 - protein, 16 aa, Homo sapiens
CARPWGRDYGDFFDYW

SEQ ID NO: 62062 - protein, 16 aa, Homo sapiens
CARDGDGYNLGTFDYW

SEQ ID NO: 62063 - protein, 17 aa, Homo sapiens
CARSRITMIVDWRWDYW

SEQ ID NO: 62064 - protein, 15 aa, Homo sapiens
CAISGGGYKSAFDYW

SEQ ID NO: 62065 - protein, 20 aa, Homo sapiens
CARDSTSRDGYNAVNYFDYW

SEQ ID NO: 62066 - protein, 19 aa, Homo sapiens
CARDHYDILTGHQILADYW

SEQ ID NO: 62067 - protein, 14 aa, Homo sapiens
CARKRPGRFPFDSW

SEQ ID NO: 62068 - protein, 20 aa, Homo sapiens
CAKDWEYDSSGYYLTLFDYW

SEQ ID NO: 62069 - protein, 22 aa, Homo sapiens
CARDHTYYDILTGTVNWYFDLW

SEQ ID NO: 62070 - protein, 24 aa, Homo sapiens
CARARELGDILTGYSYYYYGMDVW

SEQ ID NO: 62071 - protein, 23 aa, Homo sapiens
CARGRSRIVVVVAATGSYYFDYW

SEQ ID NO: 62072 - protein, 16 aa, Homo sapiens
CARSPSGWYIVPSDYW

SEQ ID NO: 62073 - protein, 17 aa, Homo sapiens
CAKDPRFVTTSYYFDYW

SEQ ID NO: 62074 - protein, 20 aa, Homo sapiens
CANYNPPRYSSSWYPYLDYW

SEQ ID NO: 62075 - protein, 17 aa, Homo sapiens
CARHLRGTSGYDGFDVW

SEQ ID NO: 62076 - protein, 21 aa, Homo sapiens
CASFHPTYGDYLDYYYGMDVW

SEQ ID NO: 62077 - protein, 17 aa, Homo sapiens
CARGMYSSSWYSGLDYW

SEQ ID NO: 62078 - protein, 18 aa, Homo sapiens
CAKGGRDSSSWYLLLDYW

SEQ ID NO: 62079 - protein, 19 aa, Homo sapiens
CAGNVLLWFGELFDGMDVW

SEQ ID NO: 62080 - protein, 19 aa, Homo sapiens
CAKDGYCSGGTKMCWFDPW

SEQ ID NO: 62081 - protein, 14 aa, Homo sapiens
CARTAFGPNYFDYW

SEQ ID NO: 62082 - protein, 20 aa, Homo sapiens
CAKDSSDSYFGSGSYPFDYW

SEQ ID NO: 62083 - protein, 18 aa, Homo sapiens
CARVNSGLGIRTDWFDPW

SEQ ID NO: 62084 - protein, 16 aa, Homo sapiens
CAREGDDYGDEYFQHW

SEQ ID NO: 62085 - protein, 21 aa, Homo sapiens
CARNGAGDGNWYSSLGGFDYW

SEQ ID NO: 62086 - protein, 16 aa, Homo sapiens
CARQRWLQLRGSLDYW

SEQ ID NO: 62087 - protein, 15 aa, Homo sapiens
CARAPTLYSGAFDYW

SEQ ID NO: 62088 - protein, 15 aa, Homo sapiens
CARTPRTSWYFFDYW

SEQ ID NO: 62089 - protein, 23 aa, Homo sapiens
CARHFMGPNLLQQLVSYWYFDLW

SEQ ID NO: 62090 - protein, 19 aa, Homo sapiens
CVRAVETTVVGFDWYFDVW

SEQ ID NO: 62091 - protein, 22 aa, Homo sapiens
CAKDRRMVALAAAGPEDAFDIW

SEQ ID NO: 62092 - protein, 16 aa, Homo sapiens
CAPQRIAVRGVTSDYW

SEQ ID NO: 62093 - protein, 29 aa, Homo sapiens
CARGPRVDYDSSGYYFPPRDYYYYGMDVW

SEQ ID NO: 62094 - protein, 17 aa, Homo sapiens
CARDTYYYGSGDAFDIW

SEQ ID NO: 62095 - protein, 16 aa, Homo sapiens
CAKVGGSGRVDYFDYW

SEQ ID NO: 62096 - protein, 21 aa, Homo sapiens
CAREGEWPQFEGQSLAAFDIW

SEQ ID NO: 62097 - protein, 14 aa, Homo sapiens
CARERDRDFWFDPW

SEQ ID NO: 62098 - protein, 17 aa, Homo sapiens
CARDLYSGFGELFSDYW

SEQ ID NO: 62099 - protein, 21 aa, Homo sapiens
CARMGRLFLTSSYYYYGMDVW

SEQ ID NO: 62100 - protein, 19 aa, Homo sapiens
CAKDSGDGYLQPDDAFDIW

SEQ ID NO: 62101 - protein, 16 aa, Homo sapiens
CARDGNRGDYSAFDIW

SEQ ID NO: 62102 - protein, 11 aa, Homo sapiens [sequence omitted]

SEQ ID NO: 62103 - protein, 21 aa, Homo sapiens
CARHARDCSGGSCYSWAFDIW

SEQ ID NO: 62104 - protein, 17 aa, Homo sapiens
CAKPMITFGGVKGPDYW

SEQ ID NO: 62105 - protein, 20 aa, Homo sapiens
CARDRDWFTTYYYYYGMDVW

SEQ ID NO: 62106 - protein, 21 aa, Homo sapiens
CAKDPPSSSWYPDTPDFEDYW

SEQ ID NO: 62107 - protein, 14 aa, Homo sapiens
CARGWGSGWYLRYW

SEQ ID NO: 62108 - protein, 19 aa, Homo sapiens
CTTDGLMAPYYYYYGMDVW

SEQ ID NO: 62109 - protein, 20 aa, Homo sapiens
CARDLPLFYRYGDYNSFDYW

SEQ ID NO: 62110 - protein, 25 aa, Homo sapiens
CARGFAFHCTGGICDYTSLYYFDFW

SEQ ID NO: 62111 - protein, 17 aa, Homo sapiens
CARKSGRSTVNDDFDLW

SEQ ID NO: 62112 - protein, 14 aa, Homo sapiens
CVKDASGWYRFDYW

SEQ ID NO: 62113 - protein, 20 aa, Homo sapiens
CARWKGAPIRGVVITGFDYW

SEQ ID NO: 62114 - protein, 18 aa, Homo sapiens
CARQGVYGDYPDWYFDLW

SEQ ID NO: 62115 - protein, 21 aa, Homo sapiens
CARQDQGLLWFGELLLGFDYW

SEQ ID NO: 62116 - protein, 21 aa, Homo sapiens
CTRDLDYYDSSGYYPSVFDYW

SEQ ID NO: 62117 - protein, 17 aa, Homo sapiens
CARGRGGQWLPEYFDYW

SEQ ID NO: 62118 - protein, 19 aa, Homo sapiens
CARGFPTTSFFYYYGMDVW

SEQ ID NO: 62119 - protein, 23 aa, Homo sapiens
CAKDRSEYYDILTGYLDDAFDIW

SEQ ID NO: 62120 - protein, 19 aa, Homo sapiens
CAREEYRSSWYRTWYFDLW

SEQ ID NO: 62121 - protein, 15 aa, Homo sapiens
CAKVHSSGSLTFDYW

SEQ ID NO: 62122 - protein, 20 aa, Homo sapiens
CARHLRFIIVGATISWFDPW

SEQ ID NO: 62123 - protein, 16 aa, Homo sapiens
CAKCIAAAGYWYFDLW

SEQ ID NO: 62124 - protein, 11 aa, Homo sapiens
CMQTMQLPPGF

SEQ ID NO: 62125 - protein, 18 aa, Homo sapiens
CSKRQILPSTNWGFFDDW

SEQ ID NO: 62126 - protein, 22 aa, Homo sapiens
CARDGLWFGELFEVKPDWFDPW

SEQ ID NO: 62127 - protein, 17 aa, Homo sapiens
CARGSPLGQRTDVFDIW

SEQ ID NO: 62128 - protein, 15 aa, Homo sapiens [sequence omitted]

SEQ ID NO: 62129 - protein, 24 aa, Homo sapiens
CARAGVGFVGGIQLWSPLFAFDIW

SEQ ID NO: 62130 - protein, 22 aa, Homo sapiens
CARGIIGGSSNRYYYYYGMDVW

SEQ ID NO: 62131 - protein, 23 aa, Homo sapiens
CAREVSLLYGPGSKPHFYYFKYW

SEQ ID NO: 62132 - protein, 20 aa, Homo sapiens
CARAGLDRDSSGWYLGFDYW

SEQ ID NO: 62133 - protein, 19 aa, Homo sapiens
CARLMFGGGIQLWRPFDYW

SEQ ID NO: 62134 - protein, 20 aa, Homo sapiens
CARDSRQAAADHYYYGMDVW

SEQ ID NO: 62135 - protein, 18 aa, Homo sapiens
CARDQGSGWYILYYFDYW

SEQ ID NO: 62136 - protein, 18 aa, Homo sapiens
CAKGGYSYGYQNYYFDYW

SEQ ID NO: 62137 - protein, 18 aa, Homo sapiens
CAKVDSSGLTGGNYFDYW

SEQ ID NO: 62138 - protein, 25 aa, Homo sapiens
CARDLGADSGTYSPRLYYYYGMDVW

SEQ ID NO: 62139 - protein, 22 aa, Homo sapiens
CARYMVVTAMPHYRPSYYFDYW

SEQ ID NO: 62140 - protein, 20 aa, Homo sapiens
CATTLGYCSGHSCSDWFDPW

SEQ ID NO: 62141 - protein, 15 aa, Homo sapiens
CARVNTRIVYYFDYW

SEQ ID NO: 62142 - protein, 18 aa, Homo sapiens
CAKDIGHGSGSRNWFDSW

SEQ ID NO: 62143 - protein, 17 aa, Homo sapiens
CAKDLGITMIVDVFDYW

SEQ ID NO: 62144 - protein, 17 aa, Homo sapiens
CAKDTAVTWGPDAFDIW

SEQ ID NO: 62145 - protein, 19 aa, Homo sapiens
CATQVYGIDWGTPYYFDYW

SEQ ID NO: 62146 - protein, 22 aa, Homo sapiens
CARTGWEDSDYYDSSGYFLDYW

SEQ ID NO: 62147 - protein, 17 aa, Homo sapiens
CAKAGWLRFWDDAFDIW

SEQ ID NO: 62148 - protein, 22 aa, Homo sapiens
CARQGRLLWFGELLSGGWFDPW

SEQ ID NO: 62149 - protein, 20 aa, Homo sapiens
CAKDIGDDIVTFRDYYFDYW

SEQ ID NO: 62150 - protein, 16 aa, Homo sapiens
CSKPRETFVSRSFDYW

SEQ ID NO: 62151 - protein, 23 aa, Homo sapiens
CARDKGYFDWLTSSYYYYGMDVW

SEQ ID NO: 62152 - protein, 16 aa, Homo sapiens
CARDIPFATSFDLDYW

SEQ ID NO: 62153 - protein, 15 aa, Homo sapiens
CARGITPVAGTDDYW

SEQ ID NO: 62154 - protein, 19 aa, Homo sapiens
CAHRQVVSSSWYGPYFDYW

SEQ ID NO: 62155 - protein, 17 aa, Homo sapiens
CAHRNIPIAAAGTFDYW

SEQ ID NO: 62156 - protein, 16 aa, Homo sapiens
CARGVVPRSPDSFDIW

SEQ ID NO: 62157 - protein, 17 aa, Homo sapiens
CARVRCSSIGCYTFDLW

SEQ ID NO: 62158 - protein, 21 aa, Homo sapiens
CTRPDRGPSGDHYFYYGMDVW

SEQ ID NO: 62159 - protein, 24 aa, Homo sapiens
CAREPHYRGQCSGGPCPLLYFDHW

SEQ ID NO: 62160 - protein, 18 aa, Homo sapiens
CAHGYDSSGASLDAFDIW

SEQ ID NO: 62161 - protein, 16 aa, Homo sapiens
CTRGDWGDYYYGMDVW

SEQ ID NO: 62162 - protein, 16 aa, Homo sapiens
CARHPPWVDTTAFDIW

SEQ ID NO: 62163 - protein, 19 aa, Homo sapiens
CVRAHNSADYFYYYGVDVW

SEQ ID NO: 62164 - protein, 21 aa, Homo sapiens
CARGSIMITFGGVIARYFDLW

SEQ ID NO: 62165 - protein, 27 aa, Homo sapiens
CARAGYSSSWYVSDYHNSYYYYGMDVW

SEQ ID NO: 62166 - protein, 23 aa, Homo sapiens
CAASYDYVWGSYRHYYYYGMDVW

SEQ ID NO: 62167 - protein, 18 aa, Homo sapiens
CATDGPWFGVGSFYFDNW

SEQ ID NO: 62168 - protein, 13 aa, Homo sapiens
CARHPVDWGFDYW

SEQ ID NO: 62169 - protein, 20 aa, Homo sapiens
CAGPRRPLWFGESYWYFDLW

SEQ ID NO: 62170 - protein, 21 aa, Homo sapiens
CTTLYYDILTGYFESPTFDYW

SEQ ID NO: 62171 - protein, 20 aa, Homo sapiens
CAKSVGLVLQFYYYYGMDVW

SEQ ID NO: 62172 - protein, 16 aa, Homo sapiens
CAHRRNTAMVLWFDPW

SEQ ID NO: 62173 - protein, 25 aa, Homo sapiens
CAKDMEKGDCGGDCYWYYYYGMDVW

SEQ ID NO: 62174 - protein, 17 aa, Homo sapiens
CTSGRYGDYQVYYFDYW

SEQ ID NO: 62175 - protein, 16 aa, Homo sapiens
CARLTESSVYQWFDPW

SEQ ID NO: 62176 - protein, 21 aa, Homo sapiens
CAKDRLYYYGSGSYSEGIDYW

SEQ ID NO: 62177 - protein, 16 aa, Homo sapiens
CARVPAVAGTWDFDYW

SEQ ID NO: 62178 - protein, 18 aa, Homo sapiens
CAKDRLKGLLWFGEFDYW

SEQ ID NO: 62179 - protein, 21 aa, Homo sapiens
CTTDRLRYFDWLLLPDAFDIW

SEQ ID NO: 62180 - protein, 14 aa, Homo sapiens
CAKTIGGYWYFDLW

SEQ ID NO: 62181 - protein, 17 aa, Homo sapiens
CVRDKEASGRYHGFDSW

SEQ ID NO: 62182 - protein, 17 aa, Homo sapiens
CARHKYGSGRTGAFDYW

SEQ ID NO: 62183 - protein, 13 aa, Homo sapiens
CATAMVTGGFDYW

SEQ ID NO: 62184 - protein, 21 aa, Homo sapiens
CARERVYWVQLWPNWGGFDYW

SEQ ID NO: 62185 - protein, 22 aa, Homo sapiens
CARRVSRLRYFDWGQNNWFDPW

SEQ ID NO: 62186 - protein, 15 aa, Homo sapiens
CARDGDGVTTLFDHW

SEQ ID NO: 62187 - protein, 23 aa, Homo sapiens
CARDAGGLLWFGELSYYYGMDVW

SEQ ID NO: 62188 - protein, 22 aa, Homo sapiens
CAKDAAPLVIAAAGMGGWFDPW

SEQ ID NO: 62189 - protein, 16 aa, Homo sapiens
CARYVKWLLPNHFDYW

SEQ ID NO: 62190 - protein, 15 aa, Homo sapiens
CAKDWDTRSDYFDYW

SEQ ID NO: 62191 - protein, 24 aa, Homo sapiens
CARHGYKGPPGDTAMVHELFFDYW

SEQ ID NO: 62192 - protein, 23 aa, Homo sapiens
CARDPQGIQLWPGYYYYYGMDVW

SEQ ID NO: 62193 - protein, 17 aa, Homo sapiens
CARYEIYDSSGYSFDYW

SEQ ID NO: 62194 - protein, 17 aa, Homo sapiens
CAKEQGSGWTPLSFDYW

SEQ ID NO: 62195 - protein, 18 aa, Homo sapiens
CAKDLYSYGYHRPTFDYW

SEQ ID NO: 62196 - protein, 19 aa, Homo sapiens
CAKGSGCTNCHVYNWLDPW

SEQ ID NO: 62197 - protein, 20 aa, Homo sapiens
CARGPYSSSWYGTAKKFDPW

SEQ ID NO: 62198 - protein, 23 aa, Homo sapiens
CAKSGEYCSGGSCYRPDRSFDYW

SEQ ID NO: 62199 - protein, 20 aa, Homo sapiens
CAIDNYSHNRRYFEASFDYW

SEQ ID NO: 62200 - protein, 19 aa, Homo sapiens
CARNRRGWLQFPNWYFDLW

SEQ ID NO: 62201 - protein, 15 aa, Homo sapiens
CAHETYYADHRFDYW

SEQ ID NO: 62202 - protein, 21 aa, Homo sapiens
CARGGITTYPGAYYYYGMDVW

SEQ ID NO: 62203 - protein, 23 aa, Homo sapiens
CALAIMITFGGVIVKGDHYFDYW

SEQ ID NO: 62204 - protein, 17 aa, Homo sapiens
CARAAVCGGDCFYFDYW

SEQ ID NO: 62205 - protein, 21 aa, Homo sapiens
CARDRLSYFERSGDRDAFDIW

SEQ ID NO: 62206 - protein, 22 aa, Homo sapiens
CATREGIAAAPIYYYYYGMDVW

SEQ ID NO: 62207 - protein, 20 aa, Homo sapiens
CARGSYFGSGSYFGGYFDLW

SEQ ID NO: 62208 - protein, 13 aa, Homo sapiens
CAGGTYNSLFHYW

SEQ ID NO: 62209 - protein, 21 aa, Homo sapiens
CAILFRGTTVAGSQRFGFDPW

SEQ ID NO: 62210 - protein, 29 aa, Homo sapiens
CARDLTSGRDYDILTGYLVYYYYYGMDVW

SEQ ID NO: 62211 - protein, 24 aa, Homo sapiens
CASEYYHDRSVYSPSLYYYAMDVW

SEQ ID NO: 62212 - protein, 21 aa, Homo sapiens
CARVSGLNTMIVVVIPYFDYW

SEQ ID NO: 62213 - protein, 23 aa, Homo sapiens
CATTAGVHDYYGSGFGFYYFDYW

SEQ ID NO: 62214 - protein, 17 aa, Homo sapiens
CAKGIRGYEHYYGMDVW

SEQ ID NO: 62215 - protein, 16 aa, Homo sapiens
CAHRVLTFGGVNFDLW

SEQ ID NO: 62216 - protein, 17 aa, Homo sapiens
CAKAATAMVTSFDFDYW

SEQ ID NO: 62217 - protein, 18 aa, Homo sapiens
CARDISSSGWYLGLFDYW

SEQ ID NO: 62218 - protein, 23 aa, Homo sapiens
CARSLSTHDLLTGYYSSAYFDFW

SEQ ID NO: 62219 - protein, 18 aa, Homo sapiens
CAHRRVRGVIMGPYFDYW

SEQ ID NO: 62220 - protein, 26 aa, Homo sapiens
CARTRWASGIVPGVRSLYSYYGMDVW

SEQ ID NO: 62221 - protein, 18 aa, Homo sapiens
CVRHGLSVAVPGTDSDYW

SEQ ID NO: 62222 - protein, 16 aa, Homo sapiens
CAKGRLGELLDAFDIW

SEQ ID NO: 62223 - protein, 16 aa, Homo sapiens
CARSRSGTYSAPFDYW

SEQ ID NO: 62224 - protein, 21 aa, Homo sapiens
CAKDGFSWLLFVGGHDAFDIW

SEQ ID NO: 62225 - protein, 22 aa, Homo sapiens
CAREGCSGGSCYSFYNWYFDLW

SEQ ID NO: 62226 - protein, 18 aa, Homo sapiens
CARDSLGSAYYPYGMDVW

SEQ ID NO: 62227 - protein, 14 aa, Homo sapiens
CATERAVFEAFDIW

SEQ ID NO: 62228 - protein, 17 aa, Homo sapiens
CARGPFMGSLSSYFDYW

SEQ ID NO: 62229 - protein, 17 aa, Homo sapiens
CAKSDSNGYYSRFFDYW

SEQ ID NO: 62230 - protein, 17 aa, Homo sapiens
CARGARGYIFDVVNDYW

SEQ ID NO: 62231 - protein, 21 aa, Homo sapiens
CARTYYDFLTAYYNEGHFDFW

SEQ ID NO: 62232 - protein, 20 aa, Homo sapiens
CVKAPFSGDSSGYYSVFDYW

SEQ ID NO: 62233 - protein, 19 aa, Homo sapiens
CATDKGLQWLVVGDAFDIW

SEQ ID NO: 62234 - protein, 18 aa, Homo sapiens
CARGNYDSSGYYQLWDYW

SEQ ID NO: 62235 - protein, 16 aa, Homo sapiens
CAKGFEQRGWFVMDYW

SEQ ID NO: 62236 - protein, 20 aa, Homo sapiens
CARTRYYYGSGTYYAYFDVW

SEQ ID NO: 62237 - protein, 14 aa, Homo sapiens
CVKEGGQPPYFDYW

SEQ ID NO: 62238 - protein, 24 aa, Homo sapiens
CARGDNPDLLLWFGELYPGPFDIW

SEQ ID NO: 62239 - protein, 13 aa, Homo sapiens
CAKLKSPYYFEYW

SEQ ID NO: 62240 - protein, 20 aa, Homo sapiens
CARDPTYGDYEYYYYGMDVW

SEQ ID NO: 62241 - protein, 16 aa, Homo sapiens
CARIIGRGYTYGFDYW

SEQ ID NO: 62242 - protein, 15 aa, Homo sapiens
CARIAVADKLALDYW

SEQ ID NO: 62243 - protein, 18 aa, Homo sapiens
CARQLVVVVATSLAFDYW

SEQ ID NO: 62244 - protein, 15 aa, Homo sapiens
CGREIFSGYYIFDYW

SEQ ID NO: 62245 - protein, 21 aa, Homo sapiens
CARVGFRWLGPFYYYYGMDVW

SEQ ID NO: 62246 - protein, 18 aa, Homo sapiens
CARDRLSYGDSPNAFDIW

SEQ ID NO: 62247 - protein, 21 aa, Homo sapiens
CARGVVDITMIVVVITPPDYW

SEQ ID NO: 62248 - protein, 17 aa, Homo sapiens
CARDLPQGGYDSPLDYW

SEQ ID NO: 62249 - protein, 15 aa, Homo sapiens
CYSTDSNGNRRRGMF

SEQ ID NO: 62250 - protein, 20 aa, Homo sapiens
CTTDPMDYYGSGSYRGFDYW

SEQ ID NO: 62251 - protein, 15 aa, Homo sapiens
CARGSGYVFRVFDYW

SEQ ID NO: 62252 - protein, 18 aa, Homo sapiens
CARSSALRSVLINPFDYW

SEQ ID NO: 62253 - protein, 18 aa, Homo sapiens
CAKASSGWYPAPTAFDIW

SEQ ID NO: 62254 - protein, 21 aa, Homo sapiens
CARDSVATIQLGHYYYGMDVW

SEQ ID NO: 62255 - protein, 23 aa, Homo sapiens
CAKPTTGAMIVAIINDGIVFDSW

SEQ ID NO: 62256 - protein, 20 aa, Homo sapiens
CARGRLVSTWFGTRNWFDPW

SEQ ID NO: 62257 - protein, 15 aa, Homo sapiens [sequence omitted]

SEQ ID NO: 62258 - protein, 19 aa, Homo sapiens
CAKVGLGYSYGWGNYFDYW

SEQ ID NO: 62259 - protein, 17 aa, Homo sapiens
CAKCFQPSTVLSPLDYW

SEQ ID NO: 62260 - protein, 23 aa, Homo sapiens
CARGYYYYDSGSYLDKSYYFDYW

SEQ ID NO: 62261 - protein, 20 aa, Homo sapiens
CATCPPSTAGWLPLLTFDSW

SEQ ID NO: 62262 - protein, 16 aa, Homo sapiens
CASLGTGRTGWYFDLW

SEQ ID NO: 62263 - protein, 25 aa, Homo sapiens
CARDVTSRQWLLERYYYYYYGMDVW

SEQ ID NO: 62264 - protein, 17 aa, Homo sapiens
CARDHTVTTLKGYFDYW

SEQ ID NO: 62265 - protein, 17 aa, Homo sapiens
CASRINQSETDDAFDIW

SEQ ID NO: 62266 - protein, 17 aa, Homo sapiens
CARSGSGWYFSLVCDYW

SEQ ID NO: 62267 - protein, 28 aa, Homo sapiens
CANHGYCSSTSCYSGTWELYYYYGMDVW

SEQ ID NO: 62268 - protein, 18 aa, Homo sapiens
CARDIPWGYPGKDYFDYW

SEQ ID NO: 62269 - protein, 17 aa, Homo sapiens
CGKAAPRWGANHYFDYW

SEQ ID NO: 62270 - protein, 23 aa, Homo sapiens
CARSARHAPIPRGRPRTVYFDSW

SEQ ID NO: 62271 - protein, 17 aa, Homo sapiens
CVRDRGAAGPYWHFDLW

SEQ ID NO: 62272 - protein, 18 aa, Homo sapiens
CAREPLGQQWLEDYFDYW

SEQ ID NO: 62273 - protein, 21 aa, Homo sapiens
CARLSYGLLWFGELLTWFDPW

SEQ ID NO: 62274 - protein, 19 aa, Homo sapiens
CARDGREWLAQDNNWFDPW

SEQ ID NO: 62275 - protein, 16 aa, Homo sapiens
CARLDYGDYWGWFDPW

SEQ ID NO: 62276 - protein, 17 aa, Homo sapiens
CARGLGGYNRGGYLDHW

SEQ ID NO: 62277 - protein, 13 aa, Homo sapiens
CTKDGDHDAFDIW

SEQ ID NO: 62278 - protein, 17 aa, Homo sapiens
CARDIVGSSWDYSFDYW

SEQ ID NO: 62279 - protein, 16 aa, Homo sapiens
CAREGVVPAAIQLDYW

SEQ ID NO: 62280 - protein, 18 aa, Homo sapiens
CAREASAYYGDYGLLDYW

SEQ ID NO: 62281 - protein, 20 aa, Homo sapiens
CAKDVYDILTGYYDDAFDIW

SEQ ID NO: 62282 - protein, 21 aa, Homo sapiens
CVREVFYGHYDTETTNAFDIW

SEQ ID NO: 62283 - protein, 26 aa, Homo sapiens
CAREWWGPYCSGGSCYSDYYYGMDVW

SEQ ID NO: 62284 - protein, 13 aa, Homo sapiens
CQQFQSWPPAFTF

SEQ ID NO: 62285 - protein, 17 aa, Homo sapiens
CAHRRGFVVAGPYFDYW

SEQ ID NO: 62286 - protein, 24 aa, Homo sapiens
CARDQGPSVIAAAGNYYYYGMDVW

SEQ ID NO: 62287 - protein, 24 aa, Homo sapiens
CAKDSRGYQLPLTSYYYYYGMDVW

SEQ ID NO: 62288 - protein, 17 aa, Homo sapiens
CARDASWGGSGRLFDPW

SEQ ID NO: 62289 - protein, 18 aa, Homo sapiens
CAKDGDSSWYYGGYFQHW

SEQ ID NO: 62290 - protein, 19 aa, Homo sapiens
CAKDPLRYSYGYFPYFDYW

SEQ ID NO: 62291 - protein, 14 aa, Homo sapiens
CQSYDNSLNYFSVF

SEQ ID NO: 62292 - protein, 20 aa, Homo sapiens
CARDMYNWNDQIYYDGMDVW

SEQ ID NO: 62293 - protein, 14 aa, Homo sapiens
CARKHLTSWHPDYW

SEQ ID NO: 62294 - protein, 21 aa, Homo sapiens
CAKDLCWRVGSCPGFDAFDIW

SEQ ID NO: 62295 - protein, 19 aa, Homo sapiens
CAHISPSDYDLGLVAFDIW

SEQ ID NO: 62296 - protein, 16 aa, Homo sapiens
CAKPTTMITSYYFDYW

SEQ ID NO: 62297 - protein, 20 aa, Homo sapiens
CARGGSNWNDVDYYYGMDVW

SEQ ID NO: 62298 - protein, 18 aa, Homo sapiens
CAKDPIGSGWPWDYFDYW

SEQ ID NO: 62299 - protein, 13 aa, Homo sapiens
CASEADYGGYDYW

SEQ ID NO: 62300 - protein, 28 aa, Homo sapiens
CARVQKSPVSYYYGSGSSSVSAAPIDYW

SEQ ID NO: 62301 - protein, 17 aa, Homo sapiens
CAKSMVRGVTDFHFDYW

SEQ ID NO: 62302 - protein, 20 aa, Homo sapiens
CARDVSSWYPPRFGDAFDIW

SEQ ID NO: 62303 - protein, 20 aa, Homo sapiens
CAYRRYGAVFGYNYGYFDYW

SEQ ID NO: 62304 - protein, 13 aa, Homo sapiens
CAKGAAYSYGDYW

SEQ ID NO: 62305 - protein, 21 aa, Homo sapiens
CAKDSEGYCSSSVCYAGFDYW

SEQ ID NO: 62306 - protein, 21 aa, Homo sapiens
CAKDGGGYDVYYYYYYGMDVW

SEQ ID NO: 62307 - protein, 21 aa, Homo sapiens
CASMHQSDILTGYYYHWFDPW

SEQ ID NO: 62308 - protein, 21 aa, Homo sapiens
CTSLIAAAGTSYYYYYGMDVW

SEQ ID NO: 62309 - protein, 15 aa, Homo sapiens
CARATISSWLNLDYW

SEQ ID NO: 62310 - protein, 17 aa, Homo sapiens
CARSYYGSGSPPWFDPW

SEQ ID NO: 62311 - protein, 19 aa, Homo sapiens
CASDPGPIRESYYRHFDSW

SEQ ID NO: 62312 - protein, 19 aa, Homo sapiens
CARTFCRGGSGCHDGFDFW

SEQ ID NO: 62313 - protein, 21 aa, Homo sapiens
CARGTLTVYPSYYYYYGMDVW

SEQ ID NO: 62314 - protein, 12 aa, Homo sapiens
CFGKGYSVADYW

SEQ ID NO: 62315 - protein, 13 aa, Homo sapiens
CQQYNNWPGLWPF

SEQ ID NO: 62316 - protein, 19 aa, Homo sapiens
CAREAHSSGWYMNWYFDLW

SEQ ID NO: 62317 - protein, 19 aa, Homo sapiens
CATPRTDYSSGWYSALDYW

SEQ ID NO: 62318 - protein, 15 aa, Homo sapiens
CATVPNAEWEYFDYW

SEQ ID NO: 62319 - protein, 23 aa, Homo sapiens
CARDSSSKDGDDDYGDYNWFDPW

SEQ ID NO: 62320 - protein, 18 aa, Homo sapiens
CASYSPITFILVPGFDIW

SEQ ID NO: 62321 - protein, 18 aa, Homo sapiens
CARDSQWLAIPYWYFDLW

SEQ ID NO: 62322 - protein, 22 aa, Homo sapiens
CARDFSYDSSGSYYYYYGMDVW

SEQ ID NO: 62323 - protein, 19 aa, Homo sapiens
CAKGPRLLWFGELLYVDYW

SEQ ID NO: 62324 - protein, 16 aa, Homo sapiens
CATGQPLTTDFWFDPW

SEQ ID NO: 62325 - protein, 16 aa, Homo sapiens
CARHWGISSVGYSDLW

SEQ ID NO: 62326 - protein, 22 aa, Homo sapiens
CARDSLHITGTTTYYYYGMDVW

SEQ ID NO: 62327 - protein, 16 aa, Homo sapiens
CAKGPVWGSSPYFDYW

SEQ ID NO: 62328 - protein, 20 aa, Homo sapiens
CARQYHKLDPNYYYYGMDVW

SEQ ID NO: 62329 - protein, 19 aa, Homo sapiens
CTRDTAIPFPVYYYGMDVW

SEQ ID NO: 62330 - protein, 16 aa, Homo sapiens
CAKVQGWLQFRYFDYW

SEQ ID NO: 62331 - protein, 16 aa, Homo sapiens
CARPSWATIPLPFDYW

SEQ ID NO: 62332 - protein, 24 aa, Homo sapiens
CARQPRIWENYFGSRIRSDWFDPW

SEQ ID NO: 62333 - protein, 17 aa, Homo sapiens
CARGDQESTDPYYFDYW

SEQ ID NO: 62334 - protein, 21 aa, Homo sapiens
CATVGQYCSGGSCYSGPIDYW

SEQ ID NO: 62335 - protein, 28 aa, Homo sapiens
CSLKASDIAIYYCARPLSPSGLDGFDIW

SEQ ID NO: 62336 - protein, 19 aa, Homo sapiens
CARELWRGGFSYADSCDIW

SEQ ID NO: 62337 - protein, 20 aa, Homo sapiens
CARDTVVVVAATLVSWFDPW

SEQ ID NO: 62338 - protein, 22 aa, Homo sapiens
CARRSYSSGWYRGAGFWAFDYW

SEQ ID NO: 62339 - protein, 26 aa, Homo sapiens
CARTDLVHEGYYDILTGYQTGWFDPW

SEQ ID NO: 62340 - protein, 23 aa, Homo sapiens
CARDVPTKGWFGELLLNNWFDPW

SEQ ID NO: 62341 - protein, 25 aa, Homo sapiens
CARDFDYRYFDWLPNGGYYYGMDVW

SEQ ID NO: 62342 - protein, 19 aa, Homo sapiens
CARVPAPQLWLYLGYFDYW

SEQ ID NO: 62343 - protein, 20 aa, Homo sapiens
CARDVSYYDSSGNLYYFDYW

SEQ ID NO: 62344 - protein, 28 aa, Homo sapiens
CAKEGLRAAAGGLIVGVYYYYYYGMDVW

SEQ ID NO: 62345 - protein, 20 aa, Homo sapiens
CARDRGLNRWLQSPDAFDIW

SEQ ID NO: 62346 - protein, 18 aa, Homo sapiens
CARRGPRGTTLSYYFDYW

SEQ ID NO: 62347 - protein, 14 aa, Homo sapiens
CATDLVMAPFFQHW

SEQ ID NO: 62348 - protein, 26 aa, Homo sapiens
CAREDGERRYDILTGYAYYYYGMDVW

SEQ ID NO: 62349 - protein, 20 aa, Homo sapiens
CAKIIAVAGNNYYYYGMDVW

SEQ ID NO: 62350 - protein, 14 aa, Homo sapiens
CARRELLPPDFDYW

SEQ ID NO: 62351 - protein, 23 aa, Homo sapiens
CARDSYCSSTSCDPIYYYGMDVW

SEQ ID NO: 62352 - protein, 21 aa, Homo sapiens
CAKRAQAYCGGDCYSGVFDYW

SEQ ID NO: 62353 - protein, 16 aa, Homo sapiens
CAHRRIAVAAGWFDPW

SEQ ID NO: 62354 - protein, 15 aa, Homo sapiens
CASHVLWSIDAFDIW

SEQ ID NO: 62355 - protein, 13 aa, Homo sapiens
CARRASNGRVDYW

SEQ ID NO: 62356 - protein, 18 aa, Homo sapiens
CAHRQAYNWNDRAYFDYW

SEQ ID NO: 62357 - protein, 19 aa, Homo sapiens
CARGFGSSWYFSASNFDFW

SEQ ID NO: 62358 - protein, 17 aa, Homo sapiens
CARGARSFLQLVAFDIW

SEQ ID NO: 62359 - protein, 19 aa, Homo sapiens
CARDPGAIVGATGGAMDVW

SEQ ID NO: 62360 - protein, 22 aa, Homo sapiens
CATHYYDSSGYYGPSWGALDYW

SEQ ID NO: 62361 - protein, 22 aa, Homo sapiens
CAHGKVLLWFGEASREYYFDYW

SEQ ID NO: 62362 - protein, 19 aa, Homo sapiens
CASHSYDYCSGDDCYPDYW

SEQ ID NO: 62363 - protein, 26 aa, Homo sapiens
CARDGAGDIWLLLKGNDYYYYGMDVW

SEQ ID NO: 62364 - protein, 23 aa, Homo sapiens
CAKPDYDILTGYPLEYYYGMDVW

SEQ ID NO: 62365 - protein, 15 aa, Homo sapiens
CASINEYSSGLYDYW

SEQ ID NO: 62366 - protein, 14 aa, Homo sapiens
CARDGKVTGYFDNW

SEQ ID NO: 62367 - protein, 19 aa, Homo sapiens
CARLTWMELWLRGWYFDLW

SEQ ID NO: 62368 - protein, 17 aa, Homo sapiens
CAVEKDFFGYVNWFDPW

SEQ ID NO: 62369 - protein, 17 aa, Homo sapiens
CATGQAVEEYYYGMDVW

SEQ ID NO: 62370 - protein, 18 aa, Homo sapiens
CARHRAVAGTGTDVFDIW

SEQ ID NO: 62371 - protein, 23 aa, Homo sapiens
CARDEYDSSGYSPGLRNWYFDLW

SEQ ID NO: 62372 - protein, 19 aa, Homo sapiens
CARSTYYYDSSGFGYFDYW

SEQ ID NO: 62373 - protein, 21 aa, Homo sapiens
CAKDGGSGAADYLYYYGMDVW

SEQ ID NO: 62374 - protein, 24 aa, Homo sapiens
CARAYFDTSGLYLITGEMYYFDLW

SEQ ID NO: 62375 - protein, 16 aa, Homo sapiens
CARMGYSSTLGTFDYW

SEQ ID NO: 62376 - protein, 19 aa, Homo sapiens
CARLLWRVPDYYYYGMDVW

SEQ ID NO: 62377 - protein, 20 aa, Homo sapiens
CARASITVPGSTAIYYFDHW

SEQ ID NO: 62378 - protein, 22 aa, Homo sapiens
CAKDRGLLWFGKIYYYYGMDVW

SEQ ID NO: 62379 - protein, 20 aa, Homo sapiens
CARGRTVTTLFGLKYYFDYW

SEQ ID NO: 62380 - protein, 21 aa, Homo sapiens
CARVNFAAYNSAWSRDALHIW

SEQ ID NO: 62381 - protein, 26 aa, Homo sapiens
CARGPNAYYDSSGYYPRRLTADFDFW

SEQ ID NO: 62382 - protein, 23 aa, Homo sapiens
CARVLYYYDSSGYARTEEWFDPW

SEQ ID NO: 62383 - protein, 22 aa, Homo sapiens
CARQPYYMADLGLYYYYGMDVW

SEQ ID NO: 62384 - protein, 20 aa, Homo sapiens
CAKDDSLAWIGEPGDSFDFW

SEQ ID NO: 62385 - protein, 24 aa, Homo sapiens
CARVYRYYYPSGTYYRDGTWFDPW

SEQ ID NO: 62386 - protein, 23 aa, Homo sapiens
CARSLSSIQLWLPNTYYYGMDVW

SEQ ID NO: 62387 - protein, 23 aa, Homo sapiens
CARNVGTISADGVRRFYYALDVW

SEQ ID NO: 62388 - protein, 15 aa, Homo sapiens
CVRLIVGGAMPIDYW

SEQ ID NO: 62389 - protein, 21 aa, Homo sapiens
CARERFGTLFSYSYHYGMDVW

SEQ ID NO: 62390 - protein, 16 aa, Homo sapiens
CALFRGYDLGEAFDIW

SEQ ID NO: 62391 - protein, 16 aa, Homo sapiens
CAKVGFSIRPVVFDIW

SEQ ID NO: 62392 - protein, 18 aa, Homo sapiens
CAKEAFGYSYGAFWFDYW

SEQ ID NO: 62393 - protein, 17 aa, Homo sapiens
CVTVAGHYYYYYGMDVW

SEQ ID NO: 62394 - protein, 19 aa, Homo sapiens
CAREVPGRFPVYYYGMDVW

SEQ ID NO: 62395 - protein, 20 aa, Homo sapiens
CARHTRDSSSFIAQYYFDYW

SEQ ID NO: 62396 - protein, 21 aa, Homo sapiens
CARRVVFLGIAAAGTTWFDPW

SEQ ID NO: 62397 - protein, 13 aa, Homo sapiens
CAAYGDLPYFDYW

SEQ ID NO: 62398 - protein, 15 aa, Homo sapiens
CARLEWDRLYAFDHW

SEQ ID NO: 62399 - protein, 23 aa, Homo sapiens
CAKDSFLGYCSGGSCYSGWFDPW

SEQ ID NO: 62400 - protein, 17 aa, Homo sapiens
CAKVITPAITTATFDYW

SEQ ID NO: 62401 - protein, 21 aa, Homo sapiens
CARGTSSWSALDYYYYGMDVW

SEQ ID NO: 62402 - protein, 13 aa, Homo sapiens
CARTLIVGAFDYW

SEQ ID NO: 62403 - protein, 18 aa, Homo sapiens
CARGDSSGWSTYYYFDYW

SEQ ID NO: 62404 - protein, 18 aa, Homo sapiens
CAHSWVMRRFGELFPDYW

SEQ ID NO: 62405 - protein, 17 aa, Homo sapiens
CAKVVEQWLVSGSWDYW

SEQ ID NO: 62406 - protein, 14 aa, Homo sapiens
CSSRDSGGNHLVVF

SEQ ID NO: 62407 - protein, 14 aa, Homo sapiens
CARFSQYFYALDVW

SEQ ID NO: 62408 - protein, 25 aa, Homo sapiens
CASRYCSSTSCIEPPTYYYYGMDVW

SEQ ID NO: 62409 - protein, 18 aa, Homo sapiens
CASHGYSGYDLTHYFDYW

SEQ ID NO: 62410 - protein, 25 aa, Homo sapiens
CAREDGRPENTIWFGESYYYGMDVW

SEQ ID NO: 62411 - protein, 15 aa, Homo sapiens
CARGRSTWSFPFDYW

SEQ ID NO: 62412 - protein, 17 aa, Homo sapiens
CARTLRSGSYYPHFDYW

SEQ ID NO: 62413 - protein, 18 aa, Homo sapiens
CARAGWRSGGTFDWFDPW

SEQ ID NO: 62414 - protein, 21 aa, Homo sapiens
CAKDHYYDSSGNYLSGAFDIW

SEQ ID NO: 62415 - protein, 19 aa, Homo sapiens
CAKDYYDSSGYYYPGTDYW

SEQ ID NO: 62416 - protein, 22 aa, Homo sapiens
CARGGYCSGGSCYRGGRYFDYW

SEQ ID NO: 62417 - protein, 18 aa, Homo sapiens
CARDFSGWYSSGIAFDIW

SEQ ID NO: 62418 - protein, 17 aa, Homo sapiens
CAKDRDSVVLWGWFDPW

SEQ ID NO: 62419 - protein, 23 aa, Homo sapiens
CARGLNGGVIVRGHYYYYGMDVW

SEQ ID NO: 62420 - protein, 26 aa, Homo sapiens
CARGPDYYDSSGYSLTNYYYYGMDVW

SEQ ID NO: 62421 - protein, 22 aa, Homo sapiens
CARRGGFGCSNTSCYSGPLDYW

SEQ ID NO: 62422 - protein, 20 aa, Homo sapiens
CARDGVIRSSSWYWNWFDPW

SEQ ID NO: 62423 - protein, 26 aa, Homo sapiens
CARHHLHYDILTGYYSWLSDGAFDIW

SEQ ID NO: 62424 - protein, 17 aa, Homo sapiens
CGRDSRYDSEGYSFDYW

SEQ ID NO: 62425 - protein, 18 aa, Homo sapiens
CAGGQWELLNYYYGMDVW

SEQ ID NO: 62426 - protein, 16 aa, Homo sapiens
CARDPYDKQNDAFDFW

SEQ ID NO: 62427 - protein, 17 aa, Homo sapiens
CARAIEGYSYGTRTDYW

SEQ ID NO: 62428 - protein, 25 aa, Homo sapiens
CARDGGKYYDSSGYYEEYYYGMDVW

SEQ ID NO: 62429 - protein, 18 aa, Homo sapiens
CVKRRGYYFDNSGYFDVW

SEQ ID NO: 62430 - protein, 16 aa, Homo sapiens
CARDGHENNYGYVDYW

SEQ ID NO: 62431 - protein, 15 aa, Homo sapiens
CARHDVEKGDAFDIW

SEQ ID NO: 62432 - protein, 16 aa, Homo sapiens
CARATRDGYNFSPDYW

SEQ ID NO: 62433 - protein, 17 aa, Homo sapiens
CAKGRVGGYSYWYFDVW

SEQ ID NO: 62434 - protein, 27 aa, Homo sapiens
CARHWVASYYDILTGYPYYYYYGMDVW

SEQ ID NO: 62435 - protein, 20 aa, Homo sapiens
CARDYTVVSTYYYYYGMDVW

SEQ ID NO: 62436 - protein, 26 aa, Homo sapiens
CARLKGGYCSGGSCSPLYYYYGMDVW

SEQ ID NO: 62437 - protein, 17 aa, Homo sapiens
CARNRAADGDLDYFDYW

SEQ ID NO: 62438 - protein, 26 aa, Homo sapiens
CARERGIVVWDNDVGNYYYYYGMDVW

SEQ ID NO: 62439 - protein, 19 aa, Homo sapiens
CVIWFYDESSDDSDAFDVW

SEQ ID NO: 62440 - protein, 19 aa, Homo sapiens
CAKDMRFDSYNLGSGIDYW

SEQ ID NO: 62441 - protein, 16 aa, Homo sapiens
CARSYSGSYREYFQHW

SEQ ID NO: 62442 - protein, 20 aa, Homo sapiens
CTTDLIWDCSSTSCYAADYW

SEQ ID NO: 62443 - protein, 17 aa, Homo sapiens
CARLFSDSVSYFWFDPW

SEQ ID NO: 62444 - protein, 18 aa, Homo sapiens
CARASLRAAGFVNWFDPW

SEQ ID NO: 62445 - protein, 17 aa, Homo sapiens
CAKGLFVAGDFRPFDKW

SEQ ID NO: 62446 - protein, 12 aa, Homo sapiens
CQHYNYWPTYTF

SEQ ID NO: 62447 - protein, 15 aa, Homo sapiens
CATGPPTGVIWFDPW

SEQ ID NO: 62448 - protein, 17 aa, Homo sapiens
CAHTLTGYYKVNWFDPW

SEQ ID NO: 62449 - protein, 26 aa, Homo sapiens
CARDYDTMVRGVIPNPYYYYYGMDVW

SEQ ID NO: 62450 - protein, 24 aa, Homo sapiens
CARESGVRYFDWSSPYYYYGMDVW

SEQ ID NO: 62451 - protein, 20 aa, Homo sapiens
CARAYSSSRTYYYYYGMDVW

SEQ ID NO: 62452 - protein, 17 aa, Homo sapiens
CAKCPDPLVVAATLDYW

SEQ ID NO: 62453 - protein, 17 aa, Homo sapiens
CAKDLSPSGRRGFFDYW

SEQ ID NO: 62454 - protein, 18 aa, Homo sapiens
CAKDQGTGELLFYYFDYW

SEQ ID NO: 62455 - protein, 23 aa, Homo sapiens
CALEGYCSGDTCHSTGTGWFGPW

SEQ ID NO: 62456 - protein, 12 aa, Homo sapiens
CVRVYSYGFDMW

SEQ ID NO: 62457 - protein, 29 aa, Homo sapiens
CTTETRGYSGYDSSTGRKNYYYYYGMDVW

SEQ ID NO: 62458 - protein, 16 aa, Homo sapiens
CARTQVGATAHGFDYW

SEQ ID NO: 62459 - protein, 21 aa, Homo sapiens
CARQYGRVVRGVIIGDAFDIW

SEQ ID NO: 62460 - protein, 20 aa, Homo sapiens
CSRGSYSSSWYGTKNHFDYW

SEQ ID NO: 62461 - protein, 20 aa, Homo sapiens
CARMVVDCSGGSCYLLFDYW

SEQ ID NO: 62462 - protein, 15 aa, Homo sapiens
CARSGFASDINFDYW

SEQ ID NO: 62463 - protein, 15 aa, Homo sapiens
CARAMGPLYGDFDYW

SEQ ID NO: 62464 - protein, 19 aa, Homo sapiens
CARERADMVRGVSYWFDPW

SEQ ID NO: 62465 - protein, 19 aa, Homo sapiens
CATWATSGYYSQNDAFDIW

SEQ ID NO: 62466 - protein, 25 aa, Homo sapiens
CARQTLHRFYYYDSSGYLPDAFDIW

SEQ ID NO: 62467 - protein, 18 aa, Homo sapiens
CARGSYEFGGWWYHFDSW

SEQ ID NO: 62468 - protein, 19 aa, Homo sapiens
CAKVSAQYSSGWFYYFDYW

SEQ ID NO: 62469 - protein, 19 aa, Homo sapiens
CAKDWKLSGSNSLGYLDYW

SEQ ID NO: 62470 - protein, 18 aa, Homo sapiens
CAKDDSSGWYDGANIDYW

SEQ ID NO: 62471 - protein, 18 aa, Homo sapiens
CARHTQHLLLWFGAADYW

SEQ ID NO: 62472 - protein, 22 aa, Homo sapiens
CARVYYDILTGYSYPEYYFDYW

SEQ ID NO: 62473 - protein, 23 aa, Homo sapiens
CVHSLRPQTKFFSGSGPYYFDYW

SEQ ID NO: 62474 - protein, 17 aa, Homo sapiens
CARDISPGYRSGWFDYW

SEQ ID NO: 62475 - protein, 21 aa, Homo sapiens
CARYCSSTSCPHYYYYGMDVW

SEQ ID NO: 62476 - protein, 16 aa, Homo sapiens
CARDKATVTSTWFDPW

SEQ ID NO: 62477 - protein, 24 aa, Homo sapiens
CARAGLLWFGVQTLGYDYYGMDVW

SEQ ID NO: 62478 - protein, 24 aa, Homo sapiens
CARASIAVAGILLGDYYYYGMDVW

SEQ ID NO: 62479 - protein, 37 aa, Homo sapiens
CARDSHSGPHPPISEPFQVLRYFDWSEVDYYYGMDVW

SEQ ID NO: 62480 - protein, 14 aa, Homo sapiens
CARSVWLVYYFDYW

SEQ ID NO: 62481 - protein, 21 aa, Homo sapiens
CARDPPSPLTTVTHSDAFDIW

SEQ ID NO: 62482 - protein, 17 aa, Homo sapiens
CARSSRYFDWLPFFDYW

SEQ ID NO: 62483 - protein, 23 aa, Homo sapiens
CARASLGSSGWPLLYYYYGMDVW

SEQ ID NO: 62484 - protein, 19 aa, Homo sapiens
CACHFSYYYDSSPYYFDYW

SEQ ID NO: 62485 - protein, 28 aa, Homo sapiens
CARDGLGTDRSYPLLWFGELLLHPLDYW

SEQ ID NO: 62486 - protein, 11 aa, Homo sapiens
CAARGNALDIW

SEQ ID NO: 62487 - protein, 23 aa, Homo sapiens
CASSSDARIIVVVVAARAAFDIW

SEQ ID NO: 62488 - protein, 19 aa, Homo sapiens
CAKDLGLGYGGLLGVFDIW

SEQ ID NO: 62489 - protein, 20 aa, Homo sapiens
CATGEVGANRGLDPSYFDFW

SEQ ID NO: 62490 - protein, 16 aa, Homo sapiens
CARDWRIAAADPFDYW

SEQ ID NO: 62491 - protein, 22 aa, Homo sapiens
CAHSDTMVRPFPPYYYYGMDVW

SEQ ID NO: 62492 - protein, 21 aa, Homo sapiens
CARGGYSSRLRDYYYYGMDVW

SEQ ID NO: 62493 - protein, 20 aa, Homo sapiens
CASTGYSSGWFSPLRWFDPW

SEQ ID NO: 62494 - protein, 21 aa, Homo sapiens
CAKDFIHIGDSSGYFPIPDYW

SEQ ID NO: 62495 - protein, 24 aa, Homo sapiens
CARRGVALWYYYGSGSSNDAFDIW

SEQ ID NO: 62496 - protein, 21 aa, Homo sapiens
CARDPAYDYVWGSYLNWFDPW

SEQ ID NO: 62497 - protein, 21 aa, Homo sapiens
CARSGGLGMFRTYYYYGMDVW

SEQ ID NO: 62498 - protein, 17 aa, Homo sapiens
CASEITDRGWTGPFDYW

SEQ ID NO: 62499 - protein, 13 aa, Homo sapiens
CARLGDIQAIDYW

SEQ ID NO: 62500 - protein, 23 aa, Homo sapiens
CARELDQAAAGSLWYYYYGMDVW

SEQ ID NO: 62501 - protein, 19 aa, Homo sapiens
CARGSPYYDILTDDAFDIW

SEQ ID NO: 62502 - protein, 15 aa, Homo sapiens
CARLQVVTAIRVDYW

SEQ ID NO: 62503 - protein, 25 aa, Homo sapiens
CAKEMSSSSGWYGLGPYYYYGMDVW

SEQ ID NO: 62504 - protein, 22 aa, Homo sapiens
CARTGRFGDLTYYYYYYGMDVW

SEQ ID NO: 62505 - protein, 16 aa, Homo sapiens
CAKGGVSSGWYGCDYW

SEQ ID NO: 62506 - protein, 20 aa, Homo sapiens
CARHSGGDYGDARTGAFDYW

SEQ ID NO: 62507 - protein, 14 aa, Homo sapiens
CARILAFRTVEDYW

SEQ ID NO: 62508 - protein, 18 aa, Homo sapiens
CARESAAGSLIVWYFDLW

SEQ ID NO: 62509 - protein, 19 aa, Homo sapiens
CARLIVVVAATEFVYFDYW

SEQ ID NO: 62510 - protein, 17 aa, Homo sapiens
CVHRGDSGDYEPPFDYW

SEQ ID NO: 62511 - protein, 25 aa, Homo sapiens
CAKDDYGDYAFRLLGPYYYYGMDDW

SEQ ID NO: 62512 - protein, 15 aa, Homo sapiens
CARRGGYDWRLFDYW

SEQ ID NO: 62513 - protein, 12 aa, Homo sapiens
CSSWLVGHFDYW

SEQ ID NO: 62514 - protein, 15 aa, Homo sapiens
CAKEGVGVTYYYDYW

SEQ ID NO: 62515 - protein, 22 aa, Homo sapiens
CASIRSEIAVAGYYYYYAMDVW

SEQ ID NO: 62516 - protein, 20 aa, Homo sapiens
CARGLVLRYFDQRANWFDPW

SEQ ID NO: 62517 - protein, 21 aa, Homo sapiens
CARERHYDPLTGPPWSWFDPW

SEQ ID NO: 62518 - protein, 18 aa, Homo sapiens
CAKASLYFDYLFSPFDYW

SEQ ID NO: 62519 - protein, 19 aa, Homo sapiens
CAKDFLGRGPPGWYYFDYW

SEQ ID NO: 62520 - protein, 17 aa, Homo sapiens
CARHVTEHLIRHWFDPW

SEQ ID NO: 62521 - protein, 21 aa, Homo sapiens
CAREPHYYDSQGRGADAFDVW

SEQ ID NO: 62522 - protein, 16 aa, Homo sapiens
CARDQGGDGYLPFDYW

SEQ ID NO: 62523 - protein, 9 aa, Homo sapiens
CASPGFVYW

SEQ ID NO: 62524 - protein, 26 aa, Homo sapiens
CARDHGSGWYSSSWRRLYYYYGMDVW

SEQ ID NO: 62525 - protein, 25 aa, Homo sapiens
CALPIWERWLQTSTLYYYYYGMDVW

SEQ ID NO: 62526 - protein, 24 aa, Homo sapiens
CAKDPVYFGSGSYYHGMVYAFDMW

SEQ ID NO: 62527 - protein, 29 aa, Homo sapiens
CARRFEDHYYDILTGYYISGYYYYGMDVW

SEQ ID NO: 62528 - protein, 20 aa, Homo sapiens
CARDSWDTANTLYYYGMDVW

SEQ ID NO: 62529 - protein, 23 aa, Homo sapiens
CARDPNSYSSSWRNYYYYGMDVW

SEQ ID NO: 62530 - protein, 27 aa, Homo sapiens
CTTVKVYYDYVWGSYRYWNEVDYFDYW

SEQ ID NO: 62531 - protein, 18 aa, Homo sapiens
CAREDILTGYYNGAFDYW

SEQ ID NO: 62532 - protein, 21 aa, Homo sapiens
CARDVVRGEMEVGYYYGMDVW

SEQ ID NO: 62533 - protein, 21 aa, Homo sapiens
CARTLWRTSHRYYYYYGMDVW

SEQ ID NO: 62534 - protein, 17 aa, Homo sapiens
CAKPHRQQLWIYYFDYW

SEQ ID NO: 62535 - protein, 19 aa, Homo sapiens
CAKLSGSPYYYDSSGSDYW

SEQ ID NO: 62536 - protein, 16 aa, Homo sapiens
CARVRGWPYREISDYW

SEQ ID NO: 62537 - protein, 18 aa, Homo sapiens
CARHIPHSRGGNYPFDIW

SEQ ID NO: 62538 - protein, 20 aa, Homo sapiens
CARGSLYASGNTDGGKFNYW

SEQ ID NO: 62539 - protein, 12 aa, Homo sapiens
CAGNLLFAFDIW

SEQ ID NO: 62540 - protein, 20 aa, Homo sapiens
CARSPSITMVRGASNWFDPW

SEQ ID NO: 62541 - protein, 16 aa, Homo sapiens
CGKDISALSGLYIDDW

SEQ ID NO: 62542 - protein, 16 aa, Homo sapiens
CARMGWGNSYGCFDYW

SEQ ID NO: 62543 - protein, 17 aa, Homo sapiens
CVRPRGSGLYYYGMDVW

SEQ ID NO: 62544 - protein, 14 aa, Homo sapiens
CARFLTGLVANDYW

SEQ ID NO: 62545 - protein, 13 aa, Homo sapiens
CTTDGVDYAFDYW

SEQ ID NO: 62546 - protein, 18 aa, Homo sapiens
CARLFLDSSGWYGYFDYW

SEQ ID NO: 62547 - protein, 17 aa, Homo sapiens
CAGEDGYSGYDSAFDIW

SEQ ID NO: 62548 - protein, 18 aa, Homo sapiens
CARMTYYFDSSGYGFDHW

SEQ ID NO: 62549 - protein, 18 aa, Homo sapiens
CARAAYCGGDCYRWFDPW

SEQ ID NO: 62550 - protein, 24 aa, Homo sapiens
CARGDVEMATISDFGYYYYGMDVW

SEQ ID NO: 62551 - protein, 24 aa, Homo sapiens
CARDFSTGYYDSSGYYYAPFFDYW

SEQ ID NO: 62552 - protein, 15 aa, Homo sapiens
CARLIGYSSSDIDYW

SEQ ID NO: 62553 - protein, 14 aa, Homo sapiens
CAKDSGWRTYFDYW

SEQ ID NO: 62554 - protein, 14 aa, Homo sapiens
CARAEWLRGAFDIW

SEQ ID NO: 62555 - protein, 21 aa, Homo sapiens
CARAIYGPPTTVYGSYYFDFW

SEQ ID NO: 62556 - protein, 19 aa, Homo sapiens
CAHIWTGYHYYYSSGMDVW

SEQ ID NO: 62557 - protein, 22 aa, Homo sapiens
CARLNFYAISGQRGPHDAFDVW

SEQ ID NO: 62558 - protein, 20 aa, Homo sapiens
CARDQGTTWFNYYYYGMDVW

SEQ ID NO: 62559 - protein, 24 aa, Homo sapiens
CAKHSCSGVTCYAGGGPSNWFDPW

SEQ ID NO: 62560 - protein, 21 aa, Homo sapiens
CATQLYSSSWYGNYYYGMDVW

SEQ ID NO: 62561 - protein, 15 aa, Homo sapiens
CAKLADTAMAGVDYW

SEQ ID NO: 62562 - protein, 17 aa, Homo sapiens
CARDDAGLLNFDAFDIW

SEQ ID NO: 62563 - protein, 22 aa, Homo sapiens
CARVVLGCSGGSCYEVRYFDYW

SEQ ID NO: 62564 - protein, 15 aa, Homo sapiens
CARRELLWFGEFSYW

SEQ ID NO: 62565 - protein, 27 aa, Homo sapiens
CARLPMRYCSGGSCYSLYYYYYGMDVW

SEQ ID NO: 62566 - protein, 19 aa, Homo sapiens
CARVDAQVTTYYYYGMDVW

SEQ ID NO: 62567 - protein, 16 aa, Homo sapiens
CATSRGYSGYDSFDYW

SEQ ID NO: 62568 - protein, 15 aa, Homo sapiens
CAREWGRYWGYLDYW

SEQ ID NO: 62569 - protein, 18 aa, Homo sapiens
CAKDMFPYGSGSNGFDYW

SEQ ID NO: 62570 - protein, 23 aa, Homo sapiens
CARGMATITWNWSVSNTYWFDPW

SEQ ID NO: 62571 - protein, 23 aa, Homo sapiens
CAKAGGGGYCSGGSCYRNYFDYW

SEQ ID NO: 62572 - protein, 26 aa, Homo sapiens
CAREGLPLYDILTGLTTYYYYGMDVW

SEQ ID NO: 62573 - protein, 17 aa, Homo sapiens
CAKDLYIGAVSGSLDYW

SEQ ID NO: 62574 - protein, 22 aa, Homo sapiens
CARDRGPYDILTGYYNPYFDYW

SEQ ID NO: 62575 - protein, 19 aa, Homo sapiens
CARHGPLWFGETFSAFDYW

SEQ ID NO: 62576 - protein, 18 aa, Homo sapiens
CATDPRIAAAGRPGADYW

SEQ ID NO: 62577 - protein, 17 aa, Homo sapiens
CELGFGTSYYYYGMDVW

SEQ ID NO: 62578 - protein, 14 aa, Homo sapiens
CGSSGWLRGLIDYW

SEQ ID NO: 62579 - protein, 18 aa, Homo sapiens
CARGPVNSGAYYWYFEDW

SEQ ID NO: 62580 - protein, 23 aa, Homo sapiens
CARGRRWERGSGWYSPFLEFDYW

SEQ ID NO: 62581 - protein, 18 aa, Homo sapiens
CARGLKWYSSSWPNFDYW

SEQ ID NO: 62582 - protein, 23 aa, Homo sapiens
CAKDLGDTLYGDSYYYYYGMDVW

SEQ ID NO: 62583 - protein, 26 aa, Homo sapiens
CARGGRYYYDSSGYYVVEPSDAFDIW

SEQ ID NO: 62584 - protein, 17 aa, Homo sapiens
CARDGRFHILTGYYDYW

SEQ ID NO: 62585 - protein, 24 aa, Homo sapiens
CARDPCPGGGSCYGGEPNYYFDYW

SEQ ID NO: 62586 - protein, 17 aa, Homo sapiens
CTTERYIKGSTLAFAVW

SEQ ID NO: 62587 - protein, 24 aa, Homo sapiens
CARVNHTIFYDSSGYYLYWYFDLW

SEQ ID NO: 62588 - protein, 22 aa, Homo sapiens
CATSGWEVVPAAIRGDDAFDIW

SEQ ID NO: 62589 - protein, 20 aa, Homo sapiens
CAKDMGGYYYGSGSNWFDPW

SEQ ID NO: 62590 - protein, 16 aa, Homo sapiens
CASRPSTVTTVGLDYW

SEQ ID NO: 62591 - protein, 15 aa, Homo sapiens
CAKEPPTTFAFFDFW

SEQ ID NO: 62592 - protein, 20 aa, Homo sapiens
CARTPPYSGSYYDPNYFDYW

SEQ ID NO: 62593 - protein, 23 aa, Homo sapiens
CARDNYAAAGFLPNYYYYGMDVW

SEQ ID NO: 62594 - protein, 23 aa, Homo sapiens
CARDLSARQSYAILTASHAFDIW

SEQ ID NO: 62595 - protein, 18 aa, Homo sapiens
CARETSLGVGATTYFDYW

SEQ ID NO: 62596 - protein, 18 aa, Homo sapiens
CAHQRSPYGDYVNYFDYW

SEQ ID NO: 62597 - protein, 18 aa, Homo sapiens
CAKDERLAVAGTGAFDIW

SEQ ID NO: 62598 - protein, 15 aa, Homo sapiens
CARRLVGAHRSFDYW

SEQ ID NO: 62599 - protein, 17 aa, Homo sapiens
CARDLGSSWYGDAFDIW

SEQ ID NO: 62600 - protein, 21 aa, Homo sapiens
CAKDPGYCGGDCYLRNYFDYW

SEQ ID NO: 62601 - protein, 19 aa, Homo sapiens
CARLEWIGYSYGPYYFDYW

SEQ ID NO: 62602 - protein, 22 aa, Homo sapiens
CAKDLHFVLLWFGEVREGGDYW

SEQ ID NO: 62603 - protein, 17 aa, Homo sapiens
CAKDWIVATIMWYFDYW

SEQ ID NO: 62604 - protein, 15 aa, Homo sapiens
CAHRTVGSWSYFQHW

SEQ ID NO: 62605 - protein, 20 aa, Homo sapiens
CARDLIPRIAAAGIPLIDYW

SEQ ID NO: 62606 - protein, 26 aa, Homo sapiens
CARGGGYCSGGSCYDNYYYYYGMDVW

SEQ ID NO: 62607 - protein, 24 aa, Homo sapiens
CARGGPYCSGGSCYFREIPPFDIW

SEQ ID NO: 62608 - protein, 14 aa, Homo sapiens
CARDRHNGFSFDYW

SEQ ID NO: 62609 - protein, 21 aa, Homo sapiens
CAKEGVTAILRPSNPEYFQYW

SEQ ID NO: 62610 - protein, 18 aa, Homo sapiens
CARHAFLWFEDKYYFDYW

SEQ ID NO: 62611 - protein, 25 aa, Homo sapiens
CARDHYYDILTAHVYYYYYYGMDVW

SEQ ID NO: 62612 - protein, 14 aa, Homo sapiens
CARGGGYDEWFDPW

SEQ ID NO: 62613 - protein, 21 aa, Homo sapiens
CAKDMGAYCGGDCYWNAFDIW

SEQ ID NO: 62614 - protein, 22 aa, Homo sapiens
CARTWGGLYDQFLLRWGWFDPW

SEQ ID NO: 62615 - protein, 18 aa, Homo sapiens
CAKDWYSSGWYGWYIDLW

SEQ ID NO: 62616 - protein, 14 aa, Homo sapiens
CARGHFGGNAFDIW

SEQ ID NO: 62617 - protein, 22 aa, Homo sapiens
CARDHLGGDDYGGWDEYYFDYW

SEQ ID NO: 62618 - protein, 23 aa, Homo sapiens
CAHRSKDTYVWGNYRYSGNFDVW

SEQ ID NO: 62619 - protein, 13 aa, Homo sapiens
CARQKYFSLFDYW

SEQ ID NO: 62620 - protein, 25 aa, Homo sapiens
CARSPRFTDVFTDYYYDNPNYFDYW

SEQ ID NO: 62621 - protein, 21 aa, Homo sapiens
CARLRSGSYYNDYYYYGMDVW

SEQ ID NO: 62622 - protein, 18 aa, Homo sapiens
CAKDMVRGVIYGYAFDYW

SEQ ID NO: 62623 - protein, 15 aa, Homo sapiens
CARGRYLHDEAFDYW

SEQ ID NO: 62624 - protein, 22 aa, Homo sapiens
CARRSVVGYYYGSGFTNWFDPW

SEQ ID NO: 62625 - protein, 20 aa, Homo sapiens
CARLPPGDGDLSYYYGMDVW

SEQ ID NO: 62626 - protein, 17 aa, Homo sapiens
CAKGFGSGTLWDAFHIW

SEQ ID NO: 62627 - protein, 20 aa, Homo sapiens
CASCNWGSWPSYYYYGMDVW

SEQ ID NO: 62628 - protein, 15 aa, Homo sapiens
CLSPDSSGTYREVVF

SEQ ID NO: 62629 - protein, 21 aa, Homo sapiens
CARVVNFDWLFLSTTGAFDIW

SEQ ID NO: 62630 - protein, 23 aa, Homo sapiens
CARVQGYSSSWYFGYYYYGMDVW

SEQ ID NO: 62631 - protein, 24 aa, Homo sapiens
CARGGYPPSTLLWFGGSKYWFDPW

SEQ ID NO: 62632 - protein, 14 aa, Homo sapiens
CYSPDGSGNHIWVF

SEQ ID NO: 62633 - protein, 13 aa, Homo sapiens
CARSSSWFGIDYW

SEQ ID NO: 62634 - protein, 18 aa, Homo sapiens
CAKDMESEVVVAAGFDYW

SEQ ID NO: 62635 - protein, 17 aa, Homo sapiens
CARSYMTTVTTLTFDYW

SEQ ID NO: 62636 - protein, 23 aa, Homo sapiens
CARDRALYCSGGLCYSGVGFDYW

SEQ ID NO: 62637 - protein, 25 aa, Homo sapiens
CARESLRYFDWLSAIGYYYYGMDVW

SEQ ID NO: 62638 - protein, 24 aa, Homo sapiens
CAKDRRPGKQYFGELLYSQGFDYW

SEQ ID NO: 62639 - protein, 16 aa, Homo sapiens
CAHRRSVVTSSYFDYW

SEQ ID NO: 62640 - protein, 22 aa, Homo sapiens
CAREGYSYGFEAQDYYYGMDVW

SEQ ID NO: 62641 - protein, 23 aa, Homo sapiens
CARDEAPDYVLWFGELLSWFDPW

SEQ ID NO: 62642 - protein, 24 aa, Homo sapiens
CARVPRNYYDSSGYYHRVSYFDYW

SEQ ID NO: 62643 - protein, 20 aa, Homo sapiens
CARGHYSSSWYGHRWHFDYW

SEQ ID NO: 62644 - protein, 23 aa, Homo sapiens
CTTDPVRSRATGYSSGWYYFDYW

SEQ ID NO: 62645 - protein, 20 aa, Homo sapiens
CARDRDNSGWYGLRIGFDPW

SEQ ID NO: 62646 - protein, 21 aa, Homo sapiens
CARDAATSKLNYYYYYGMDVW

SEQ ID NO: 62647 - protein, 19 aa, Homo sapiens
CAKWATLWDPSEDDAMDIW

SEQ ID NO: 62648 - protein, 13 aa, Homo sapiens
CAAGEGLPNFDYW

SEQ ID NO: 62649 - protein, 17 aa, Homo sapiens
CARHYYGDLYSSDFDYW

SEQ ID NO: 62650 - protein, 17 aa, Homo sapiens
CARVRLGDLSRDAFDIW

SEQ ID NO: 62651 - protein, 19 aa, Homo sapiens
CAHKGSDLLTGYFTPFDYW

SEQ ID NO: 62652 - protein, 24 aa, Homo sapiens
CARDTEPLYCTNGVCYYYYGMDVW

SEQ ID NO: 62653 - protein, 28 aa, Homo sapiens
CARDTAPIYYDILNGYYRRARSGVFDIW

SEQ ID NO: 62654 - protein, 18 aa, Homo sapiens
CVRDFLNHAIGEARPDYW

SEQ ID NO: 62655 - protein, 19 aa, Homo sapiens
CAREVSGFAVGGTSAFDIW

SEQ ID NO: 62656 - protein, 20 aa, Homo sapiens
CARGVPQGDSDSSGYYEDYW

SEQ ID NO: 62657 - protein, 11 aa, Homo sapiens [sequence omitted]

SEQ ID NO: 62658 - protein, 22 aa, Homo sapiens
CARGRVYYASGRYTYHYYMDVW

SEQ ID NO: 62659 - protein, 18 aa, Homo sapiens
CAKGRLWFADLGFGFDPW

SEQ ID NO: 62660 - protein, 26 aa, Homo sapiens
CARDPNPHDFWSGYYKDYYYYGMDVW

SEQ ID NO: 62661 - protein, 26 aa, Homo sapiens
CARISASYYDFGSGLIRDSTHYFDIW

SEQ ID NO: 62662 - protein, 18 aa, Homo sapiens
CARSRKYDFSPEYYMDVW

SEQ ID NO: 62663 - protein, 19 aa, Homo sapiens
CARSYYDILTGYLTTFDYW

SEQ ID NO: 62664 - protein, 22 aa, Homo sapiens
CATHAEYGFWSGYSGKYYMDVW

SEQ ID NO: 62665 - protein, 23 aa, Homo sapiens
CARHLRASPRSQFTGNTNWFDPW

SEQ ID NO: 62666 - protein, 21 aa, Homo sapiens
CARDPEPWGYSLGHFNPFDVW

SEQ ID NO: 62667 - protein, 20 aa, Homo sapiens
CATTYYYDSSGYYRRAFDIW

SEQ ID NO: 62668 - protein, 19 aa, Homo sapiens
CAKVHRNSAAFYYYALDVW

SEQ ID NO: 62669 - protein, 22 aa, Homo sapiens
CARDLTTTAPPTHYYYYGMDVW

SEQ ID NO: 62670 - protein, 19 aa, Homo sapiens
CARSGGPRWLVRGDWFDPW

SEQ ID NO: 62671 - protein, 21 aa, Homo sapiens
CGKGLELDGAHYYYYYGVDVW

SEQ ID NO: 62672 - protein, 23 aa, Homo sapiens
CARGGYSSSWYTQIHTPTSLDYW

SEQ ID NO: 62673 - protein, 18 aa, Homo sapiens
CATAGITIFGVVTNFDYW

SEQ ID NO: 62674 - protein, 18 aa, Homo sapiens
CAKLGYSSSSGQADFDYW

SEQ ID NO: 62675 - protein, 22 aa, Homo sapiens
CARPPYYDYVWGSYRSDAFDIW

SEQ ID NO: 62676 - protein, 16 aa, Homo sapiens
CARARRDILHYYLDYW

SEQ ID NO: 62677 - protein, 22 aa, Homo sapiens
CARDTYEQQLVQVYYYYGMDVW

SEQ ID NO: 62678 - protein, 24 aa, Homo sapiens
CTTVSDIVLMVYAPRGGNNWFDPW

SEQ ID NO: 62679 - protein, 18 aa, Homo sapiens
CARLPETATNLASLFDDW

SEQ ID NO: 62680 - protein, 16 aa, Homo sapiens
CTTGVTVPYYYGMDVW

SEQ ID NO: 62681 - protein, 22 aa, Homo sapiens
CARDTITMVRGVNLYYYGMDVW

SEQ ID NO: 62682 - protein, 26 aa, Homo sapiens
CTKEKRIDYYESSGSEVYYYYGMDVW

SEQ ID NO: 62683 - protein, 21 aa, Homo sapiens
CARDGVTVGAAYYYYYGMDVW

SEQ ID NO: 62684 - protein, 11 aa, Homo sapiens
CQQYRHYSRMF

SEQ ID NO: 62685 - protein, 19 aa, Homo sapiens
CARDGRINHSYGDYNMDYW

SEQ ID NO: 62686 - protein, 18 aa, Homo sapiens
CARLKYSSGWTDKDFDYW

SEQ ID NO: 62687 - protein, 11 aa, Homo sapiens
CQQSFNTPPSF

SEQ ID NO: 62688 - protein, 19 aa, Homo sapiens
CAREYGYFDSSGLSWFDPW

SEQ ID NO: 62689 - protein, 13 aa, Homo sapiens
CSRGGTTDWDDYW

SEQ ID NO: 62690 - protein, 21 aa, Homo sapiens
CAKDLVMNGEYDYYYYGMDVW

SEQ ID NO: 62691 - protein, 17 aa, Homo sapiens
CARGRGWLPTGGYFDPW

SEQ ID NO: 62692 - protein, 20 aa, Homo sapiens
CARVNVWFQGSGYPDAFDFW

SEQ ID NO: 62693 - protein, 15 aa, Homo sapiens
CARAQWIQLWLFDYW

SEQ ID NO: 62694 - protein, 17 aa, Homo sapiens
CARELDCASTSCQFDYW

SEQ ID NO: 62695 - protein, 16 aa, Homo sapiens
CARIRGDPTGYYPDSW

SEQ ID NO: 62696 - protein, 20 aa, Homo sapiens
CAREGYSSSWYERGYYFDYW

SEQ ID NO: 62697 - protein, 16 aa, Homo sapiens
CTRDRIWPTTRYFDSW

SEQ ID NO: 62698 - protein, 18 aa, Homo sapiens
CARDRVSAAVVGAHFDLW

SEQ ID NO: 62699 - protein, 20 aa, Homo sapiens
CAKAFYDFWSGYSQYYFDYW

SEQ ID NO: 62700 - protein, 15 aa, Homo sapiens
CARGKMVWLADFDYW

SEQ ID NO: 62701 - protein, 17 aa, Homo sapiens
CARDMTTLSPVPYFDLW

SEQ ID NO: 62702 - protein, 22 aa, Homo sapiens
CAKDTRPRLDYHDSTGYYFHYW

SEQ ID NO: 62703 - protein, 20 aa, Homo sapiens
CARGYCGSDACYFFDFLDVW

SEQ ID NO: 62704 - protein, 16 aa, Homo sapiens
CAKEGNSGSAVWFDPW

SEQ ID NO: 62705 - protein, 17 aa, Homo sapiens
CAAIPGYCSGDPCDDYW

SEQ ID NO: 62706 - protein, 24 aa, Homo sapiens
CARDSLVVVVAATPYYYYYGMDVW

SEQ ID NO: 62707 - protein, 23 aa, Homo sapiens
CARAGAHTVGAHSGRWYGGLDYW

SEQ ID NO: 62708 - protein, 14 aa, Homo sapiens
CAGLNADPYYIDYW

SEQ ID NO: 62709 - protein, 22 aa, Homo sapiens
CARESSYYYDSSGASRGAFDIW

SEQ ID NO: 62710 - protein, 15 aa, Homo sapiens
CARQSGYYHQGFDYW

SEQ ID NO: 62711 - protein, 20 aa, Homo sapiens
CARGGTIFGVVIKYNWFDPW

SEQ ID NO: 62712 - protein, 25 aa, Homo sapiens
CAREGTITMVRGAHRFGRYSHFDYW

SEQ ID NO: 62713 - protein, 13 aa, Homo sapiens
CARGRHAAPFDSW

SEQ ID NO: 62714 - protein, 16 aa, Homo sapiens
CVRGGDFGDYAMSDYW

SEQ ID NO: 62715 - protein, 25 aa, Homo sapiens
CAKMVSVMYRYCSGGSCYSDAFDIW

SEQ ID NO: 62716 - protein, 19 aa, Homo sapiens
CARDQTSTRYYYYYGMDVW

SEQ ID NO: 62717 - protein, 25 aa, Homo sapiens
CARLLWETSCSSTSCYRRYDAFDIW

SEQ ID NO: 62718 - protein, 15 aa, Homo sapiens
CAKVTGYGDGAFDIW

SEQ ID NO: 62719 - protein, 20 aa, Homo sapiens
CAREGNLWFEELYYYYMDVW

SEQ ID NO: 62720 - protein, 19 aa, Homo sapiens
CARDTYYDVWRSGDGMDVW

SEQ ID NO: 62721 - protein, 17 aa, Homo sapiens
CAKTQTTYYYGSGPDYW

SEQ ID NO: 62722 - protein, 22 aa, Homo sapiens
CARRRGTNCNKTSCSGYWFDPW

SEQ ID NO: 62723 - protein, 23 aa, Homo sapiens
CARDMVVAGTNDLIYYYYGMDVW

SEQ ID NO: 62724 - protein, 13 aa, Homo sapiens
CATLRTYGDFDYW

SEQ ID NO: 62725 - protein, 16 aa, Homo sapiens
CARVPLPIVDTAPDYW

SEQ ID NO: 62726 - protein, 21 aa, Homo sapiens
CAKDLLKGYQLWSGESPFDYW

SEQ ID NO: 62727 - protein, 19 aa, Homo sapiens
CAKDLHGERSFYYYGMDVW

SEQ ID NO: 62728 - protein, 20 aa, Homo sapiens
CAREDRVGGATNYYYGMDVW

SEQ ID NO: 62729 - protein, 21 aa, Homo sapiens
CARYGSGSYYNDYYYYGMDVW

SEQ ID NO: 62730 - protein, 20 aa, Homo sapiens
CAKDLAGGTTGTTHLAFDIW

SEQ ID NO: 62731 - protein, 17 aa, Homo sapiens
CAKQDTAMVTGEYFDYW

SEQ ID NO: 62732 - protein, 23 aa, Homo sapiens
CARTLEYYDYVWGSYRYGAFDIW

SEQ ID NO: 62733 - protein, 21 aa, Homo sapiens
CASAYYDYWSGYSYQNWFDPW

SEQ ID NO: 62734 - protein, 20 aa, Homo sapiens
CARLGRLLWFGTVGNYFDPW

SEQ ID NO: 62735 - protein, 16 aa, Homo sapiens
CARDPGWDSTVTTDYW

SEQ ID NO: 62736 - protein, 20 aa, Homo sapiens
CTTRITISGVGKYDGAFDIW

SEQ ID NO: 62737 - protein, 16 aa, Homo sapiens
CARYGIPVAGTGFDYW

SEQ ID NO: 62738 - protein, 23 aa, Homo sapiens
CARDGIDIVVLPSYARRGYFDYW

SEQ ID NO: 62739 - protein, 18 aa, Homo sapiens
CTRRTFYSDANGYHRDYW

SEQ ID NO: 62740 - protein, 22 aa, Homo sapiens
CAKDRTLITIFGVVTEYYFDYW

SEQ ID NO: 62741 - protein, 21 aa, Homo sapiens
CARQAVLLWFGELAPYYFDYW

SEQ ID NO: 62742 - protein, 14 aa, Homo sapiens
CARTYSGYTPFDYW

SEQ ID NO: 62743 - protein, 21 aa, Homo sapiens
CTTDILYCTPTNCYVTAFDIW

SEQ ID NO: 62744 - protein, 18 aa, Homo sapiens
CVRRRWKLHWQIDAFDVW

SEQ ID NO: 62745 - protein, 25 aa, Homo sapiens
CAREWVDFWSGYYTPTYYYYGMDVW

SEQ ID NO: 62746 - protein, 12 aa, Homo sapiens [sequence omitted]

SEQ ID NO: 62747 - protein, 19 aa, Homo sapiens
CARLYSNNAGWFGNYFDSW

SEQ ID NO: 62748 - protein, 22 aa, Homo sapiens
CARESQFCFSSRCFGAKYFDHW

SEQ ID NO: 62749 - protein, 17 aa, Homo sapiens
CARGQDGSGYYAALDYW

SEQ ID NO: 62750 - protein, 18 aa, Homo sapiens
CSRGEELDSGNYMWFAPW

SEQ ID NO: 62751 - protein, 18 aa, Homo sapiens
CARDSAMVRGVIGLFDYW

SEQ ID NO: 62752 - protein, 18 aa, Homo sapiens
CARRRYNWNQLGDWFDPW

SEQ ID NO: 62753 - protein, 17 aa, Homo sapiens
CTTDFWSGYYLDYMDVW

SEQ ID NO: 62754 - protein, 15 aa, Homo sapiens
CARTFYNFSTGLDYW

SEQ ID NO: 62755 - protein, 14 aa, Homo sapiens
CARNYQQLATFDSW

SEQ ID NO: 62756 - protein, 15 aa, Homo sapiens
CAILGGMATGPFDYW

SEQ ID NO: 62757 - protein, 14 aa, Homo sapiens
CQSSDTSLSGLRVF

SEQ ID NO: 62758 - protein, 18 aa, Homo sapiens
CARGEKYSSGRGDWFDPW

SEQ ID NO: 62759 - protein, 21 aa, Homo sapiens
CVKGKYDALTGYWGRGWFDSW

SEQ ID NO: 62760 - protein, 26 aa, Homo sapiens
CASHRGYGSGSYYDSLAGYYYYMDVW

SEQ ID NO: 62761 - protein, 19 aa, Homo sapiens
CAKGAVGYGSGSYYYLDYW

SEQ ID NO: 62762 - protein, 25 aa, Homo sapiens
CVRGGTERAGLAGTRVSKSRYFDYW

SEQ ID NO: 62763 - protein, 15 aa, Homo sapiens
CAKVKVSAAGSFDSW

SEQ ID NO: 62764 - protein, 21 aa, Homo sapiens
CARDMIWFGEQIYYYYGMDVW

SEQ ID NO: 62765 - protein, 18 aa, Homo sapiens
CARRHLVGAHRDDGFDMW

SEQ ID NO: 62766 - protein, 20 aa, Homo sapiens
CASGPGRAARLGYYYGMDVW

SEQ ID NO: 62767 - protein, 15 aa, Homo sapiens
CASHDFWSGYYFDYW

SEQ ID NO: 62768 - protein, 17 aa, Homo sapiens
CAKDPLPGPPEFYFDYW

SEQ ID NO: 62769 - protein, 18 aa, Homo sapiens
CARVGLYDTSGFREVDYW

SEQ ID NO: 62770 - protein, 16 aa, Homo sapiens
CARDGAVSGSTHFDYW

SEQ ID NO: 62771 - protein, 25 aa, Homo sapiens
CARGRAGVTMIVVVMTGAYYYFDYW

SEQ ID NO: 62772 - protein, 20 aa, Homo sapiens
CARDIVALDTRTSLSWFDPW

SEQ ID NO: 62773 - protein, 19 aa, Homo sapiens
CAKDRLMGHNFGSYYFQSW

SEQ ID NO: 62774 - protein, 19 aa, Homo sapiens
CARDRYSGSWLPLYYFDYW

SEQ ID NO: 62775 - protein, 19 aa, Homo sapiens
CARLFPTYYYGSGSYLDTW

SEQ ID NO: 62776 - protein, 18 aa, Homo sapiens
CASFGYDSSGYDYYFDYW

SEQ ID NO: 62777 - protein, 19 aa, Homo sapiens
CAHRPRWDWSLWEMAFDSW

SEQ ID NO: 62778 - protein, 17 aa, Homo sapiens
CTREIPDGSNSFGFDLW

SEQ ID NO: 62779 - protein, 15 aa, Homo sapiens
CASSTGSYSGYFDPW

SEQ ID NO: 62780 - protein, 17 aa, Homo sapiens
CAKVRGIAARQYYFDYW

SEQ ID NO: 62781 - protein, 18 aa, Homo sapiens
CAKDPHYDFWSGYYLDYW

SEQ ID NO: 62782 - protein, 14 aa, Homo sapiens
CARARPLFNWFDPW

SEQ ID NO: 62783 - protein, 16 aa, Homo sapiens
CARDDPYSSNWGPDYW

SEQ ID NO: 62784 - protein, 20 aa, Homo sapiens
CVKDISYDPVGYDYDAFDVW

SEQ ID NO: 62785 - protein, 24 aa, Homo sapiens
CARDSRYFDSSGYYSYFYYYMDVW

SEQ ID NO: 62786 - protein, 21 aa, Homo sapiens
CARDAIAVAANDYYYYGMDVW

SEQ ID NO: 62787 - protein, 25 aa, Homo sapiens
CARGDSGDCSGLSCYTYYGNRFDPW

SEQ ID NO: 62788 - protein, 21 aa, Homo sapiens
CARDQPTLWFGELSSPDFDYW

SEQ ID NO: 62789 - protein, 15 aa, Homo sapiens
CVRHRNSGWGWFGPW

SEQ ID NO: 62790 - protein, 22 aa, Homo sapiens
CARDPGYSSGGSYYSDGYLDYW

SEQ ID NO: 62791 - protein, 15 aa, Homo sapiens
CAVGGYNSGDAFDIW

SEQ ID NO: 62792 - protein, 16 aa, Homo sapiens
CATDNGWYDVTNFGYW

SEQ ID NO: 62793 - protein, 24 aa, Homo sapiens
CARAKGSDSSGYYVSYYYYGMDVW

SEQ ID NO: 62794 - protein, 12 aa, Homo sapiens
CARALGYWFDPW

SEQ ID NO: 62795 - protein, 21 aa, Homo sapiens
CARDIPGRNCSSFSCYAFDIW

SEQ ID NO: 62796 - protein, 17 aa, Homo sapiens
CARGGYCSDFNCRFDYW

SEQ ID NO: 62797 - protein, 14 aa, Homo sapiens
CARQTSTFSYFDYW

SEQ ID NO: 62798 - protein, 15 aa, Homo sapiens
CAKGGPTILHWFDTW

SEQ ID NO: 62799 - protein, 18 aa, Homo sapiens
CARADLGYSYGLDAFDIW

SEQ ID NO: 62800 - protein, 18 aa, Homo sapiens
CAREGLAVTNTDGAFEYW

SEQ ID NO: 62801 - protein, 21 aa, Homo sapiens
CAKWPAFTHNDFWSGSTFDYW

SEQ ID NO: 62802 - protein, 18 aa, Homo sapiens
CAKDRSSGWRPQYYFDYW

SEQ ID NO: 62803 - protein, 18 aa, Homo sapiens
CARAVPAARNKINWFDPW

SEQ ID NO: 62804 - protein, 15 aa, Homo sapiens
CARAGQSSGSPFDVW

SEQ ID NO: 62805 - protein, 18 aa, Homo sapiens
CARVQTTIFGVVIMVDYW

SEQ ID NO: 62806 - protein, 18 aa, Homo sapiens
CARGRGSITMIRDSMDVW

SEQ ID NO: 62807 - protein, 24 aa, Homo sapiens
CARAHRPQFYYDSGDSLPYYFDFW

SEQ ID NO: 62808 - protein, 18 aa, Homo sapiens
CASELSSGWYVTGAFDIW

SEQ ID NO: 62809 - protein, 21 aa, Homo sapiens
CAKYVVVVPAARYYYYYMDVW

SEQ ID NO: 62810 - protein, 17 aa, Homo sapiens
CAKGAWYSSGWWGLDYW

SEQ ID NO: 62811 - protein, 14 aa, Homo sapiens
CAKVASRGYCFDSW

SEQ ID NO: 62812 - protein, 22 aa, Homo sapiens
CARHGPNYDSSGYPFSRYFDLW

SEQ ID NO: 62813 - protein, 19 aa, Homo sapiens
CARHIVRRIAAATGWFDPW

SEQ ID NO: 62814 - protein, 20 aa, Homo sapiens
CARGGDFWSGYFGLHCLDYW

SEQ ID NO: 62815 - protein, 18 aa, Homo sapiens
CAKEWTLVEHYYYGMDVW

SEQ ID NO: 62816 - protein, 19 aa, Homo sapiens
CARATYDYWRDYATYFDYW

SEQ ID NO: 62817 - protein, 19 aa, Homo sapiens
CARAHRDWPTPWEYYFEFW

SEQ ID NO: 62818 - protein, 13 aa, Homo sapiens
CTTGLGLTDNDYW

SEQ ID NO: 62819 - protein, 15 aa, Homo sapiens
CARHNNYGYSWFDPW

SEQ ID NO: 62820 - protein, 24 aa, Homo sapiens
CARGPRLWFGEADGPTPPLPFDYW

SEQ ID NO: 62821 - protein, 20 aa, Homo sapiens
CARDPQGIAAPPYYYGMDVW

SEQ ID NO: 62822 - protein, 17 aa, Homo sapiens
CAKDGTPYDILTGPDYW

SEQ ID NO: 62823 - protein, 17 aa, Homo sapiens
CARDGLVTAPSDAYDIW

SEQ ID NO: 62824 - protein, 11 aa, Homo sapiens
CAREMYAIDYW

SEQ ID NO: 62825 - protein, 22 aa, Homo sapiens
CAKDTRPRIDYYDGTGYYFDNW

SEQ ID NO: 62826 - protein, 14 aa, Homo sapiens
CARYRGDYADFDSW

SEQ ID NO: 62827 - protein, 15 aa, Homo sapiens
CARDHKEDYKDIDYW

SEQ ID NO: 62828 - protein, 21 aa, Homo sapiens
CAAEGGYCSSSTCYSSAFDIW

SEQ ID NO: 62829 - protein, 20 aa, Homo sapiens
CARDLLNRNNSYYYYGMDVW

SEQ ID NO: 62830 - protein, 17 aa, Homo sapiens
CAISYYYGSGDDAFDIW

SEQ ID NO: 62831 - protein, 17 aa, Homo sapiens
CARVLGATSLYYYMDVW

SEQ ID NO: 62832 - protein, 17 aa, Homo sapiens
CQSYDSRRDSRLSGWVF

SEQ ID NO: 62833 - protein, 15 aa, Homo sapiens
CVRVWGSSSWFFGYW

SEQ ID NO: 62834 - protein, 24 aa, Homo sapiens
CARDIAVAGQNPAPQYYYYGMDVW

SEQ ID NO: 62835 - protein, 24 aa, Homo sapiens
CARVAKSQYYDFWSGYSHDAFDIW

SEQ ID NO: 62836 - protein, 20 aa, Homo sapiens
CARDQGYCSGGSCYFLFDYW

SEQ ID NO: 62837 - protein, 15 aa, Homo sapiens
CAKEGGLDSNWFDPW

SEQ ID NO: 62838 - protein, 18 aa, Homo sapiens
CARVMGNFLSPLNYFDPW

SEQ ID NO: 62839 - protein, 17 aa, Homo sapiens
CVKDAGYGDHPWYFDFW

SEQ ID NO: 62840 - protein, 22 aa, Homo sapiens
CAKDMGLYYYGSGSYSRGFDYW

SEQ ID NO: 62841 - protein, 22 aa, Homo sapiens
CAKDFGGGFRHFSYYYSYMDVW

SEQ ID NO: 62842 - protein, 14 aa, Homo sapiens
CARGLEPWDGFDFW

SEQ ID NO: 62843 - protein, 17 aa, Homo sapiens
CAKGGWYMSGTTYFDYW

SEQ ID NO: 62844 - protein, 16 aa, Homo sapiens
CARDWSIAGRSWFDPW

SEQ ID NO: 62845 - protein, 11 aa, Homo sapiens
CTRYPGYFDYW

SEQ ID NO: 62846 - protein, 18 aa, Homo sapiens
CAKDWAQYSSDWYYFDYW

SEQ ID NO: 62847 - protein, 25 aa, Homo sapiens
CARDSWGKGTTGTTGVYYYYGMDVW

SEQ ID NO: 62848 - protein, 13 aa, Homo sapiens
CHSRDSSGSLFLF

SEQ ID NO: 62849 - protein, 28 aa, Homo sapiens
CLRSEDTAVYFCATGSFTGVVIYAFYIW

SEQ ID NO: 62850 - protein, 17 aa, Homo sapiens
CARENGEWPYYYGMDVW

SEQ ID NO: 62851 - protein, 21 aa, Homo sapiens
CARGDVDTFKGGYYYYGMDVW

SEQ ID NO: 62852 - protein, 16 aa, Homo sapiens
CARAFGSKFANWFDPW

SEQ ID NO: 62853 - protein, 19 aa, Homo sapiens
CARADLTDWVLSDPYFDYW

SEQ ID NO: 62854 - protein, 17 aa, Homo sapiens
CVAVDPPTLYSSGPDYW

SEQ ID NO: 62855 - protein, 16 aa, Homo sapiens
CAKFRYSNYRTYFDSW

SEQ ID NO: 62856 - protein, 18 aa, Homo sapiens
CARGRMISLVTTGWFDPW

SEQ ID NO: 62857 - protein, 20 aa, Homo sapiens
CARERPLQFFSPVPDGFDIW

SEQ ID NO: 62858 - protein, 17 aa, Homo sapiens
CTKSREVVAGLYAFDVW

SEQ ID NO: 62859 - protein, 16 aa, Homo sapiens
CARRSIAARHWYFDLW

SEQ ID NO: 62860 - protein, 18 aa, Homo sapiens
CASDYYGSGIPNDVNDYW

SEQ ID NO: 62861 - protein, 15 aa, Homo sapiens
CARQVGYSSSWSDYW

SEQ ID NO: 62862 - protein, 11 aa, Homo sapiens [sequence omitted]

SEQ ID NO: 62863 - protein, 15 aa, Homo sapiens
CARGDPVPLSRPDYW

SEQ ID NO: 62864 - protein, 22 aa, Homo sapiens
CARDLGYYYDSSGTPRGAFDIW

SEQ ID NO: 62865 - protein, 14 aa, Homo sapiens
CAKDRRILSYFDYW

SEQ ID NO: 62866 - protein, 18 aa, Homo sapiens
CAKAASAGTSFYYYMDVW

SEQ ID NO: 62867 - protein, 17 aa, Homo sapiens
CARLNWNYGGDNWFDPW

SEQ ID NO: 62868 - protein, 14 aa, Homo sapiens
CSSYTTSSAFNWVF

SEQ ID NO: 62869 - protein, 18 aa, Homo sapiens
CATIIISSWLGGGWFDLW

SEQ ID NO: 62870 - protein, 17 aa, Homo sapiens
CARDGDSGYDTNWFDPW

SEQ ID NO: 62871 - protein, 22 aa, Homo sapiens
CARDRYYYGSGKRDYYYGMDVW

SEQ ID NO: 62872 - protein, 17 aa, Homo sapiens
CARHDRGWSGKNWFDPW

SEQ ID NO: 62873 - protein, 11 aa, Homo sapiens
CVRRTVDTDYW

SEQ ID NO: 62874 - protein, 28 aa, Homo sapiens
CARAGWGRELRYFDWLTPHYYYYGMDVW

SEQ ID NO: 62875 - protein, 18 aa, Homo sapiens
CARDGSSSVPFLYYMDVW

SEQ ID NO: 62876 - protein, 16 aa, Homo sapiens
CAKDRGPTGRLLFDYW

SEQ ID NO: 62877 - protein, 20 aa, Homo sapiens
CAGAQRRPNSSSWYGAFDIW

SEQ ID NO: 62878 - protein, 18 aa, Homo sapiens
CARETVVPSEGIDCFDIW

SEQ ID NO: 62879 - protein, 18 aa, Homo sapiens
CGRDLAVAGRGPRPLDYW

SEQ ID NO: 62880 - protein, 15 aa, Homo sapiens
CAKDIGYSSGYPDYW

SEQ ID NO: 62881 - protein, 15 aa, Homo sapiens
CVRMRSWTNDAFDIW

SEQ ID NO: 62882 - protein, 17 aa, Homo sapiens
CATKNIYSDGYYSLDYW

SEQ ID NO: 62883 - protein, 17 aa, Homo sapiens
CARDCMGIAAAGTVDYW

SEQ ID NO: 62884 - protein, 17 aa, Homo sapiens
CAKEQESRFLEWCFEYW

SEQ ID NO: 62885 - protein, 21 aa, Homo sapiens
CARFAVAARPWRYYYYGMDVW

SEQ ID NO: 62886 - protein, 22 aa, Homo sapiens
CARGGYSYGYVFHSEDNWFDPW

SEQ ID NO: 62887 - protein, 20 aa, Homo sapiens
CSRDNMRWLDYTYYYYMDIW

SEQ ID NO: 62888 - protein, 16 aa, Homo sapiens
CARVNSFFGGDAFDIW

SEQ ID NO: 62889 - protein, 18 aa, Homo sapiens
CARGNYDSSGYYPNFDYW

SEQ ID NO: 62890 - protein, 13 aa, Homo sapiens
CTRGPKGTVTDYW

SEQ ID NO: 62891 - protein, 19 aa, Homo sapiens
CARGHVSIGQWLVPYFDFW

SEQ ID NO: 62892 - protein, 22 aa, Homo sapiens
CASDSIAYCGGDCSFQNAFDVW

SEQ ID NO: 62893 - protein, 25 aa, Homo sapiens
CARGDSDSCSGESCYSYFGTWFGPW

SEQ ID NO: 62894 - protein, 16 aa, Homo sapiens
CVRDRGSGWPRTFDYW

SEQ ID NO: 62895 - protein, 23 aa, Homo sapiens
CARGLQEVRGVIRRYYYYYMDVW

SEQ ID NO: 62896 - protein, 16 aa, Homo sapiens
CASPKRFGGPGAFDIW

SEQ ID NO: 62897 - protein, 11 aa, Homo sapiens [sequence omitted]

SEQ ID NO: 62898 - protein, 23 aa, Homo sapiens
CARSLAARQWPASWYYYYGMDVW

SEQ ID NO: 62899 - protein, 16 aa, Homo sapiens
CARERCSAYSCFFDSW

SEQ ID NO: 62900 - protein, 20 aa, Homo sapiens
CARALRSLVGVAQANWFDPW

SEQ ID NO: 62901 - protein, 13 aa, Homo sapiens
CSAWDSDLRAWLF

SEQ ID NO: 62902 - protein, 18 aa, Homo sapiens
CARSPSLFQVPAAAFDPW

SEQ ID NO: 62903 - protein, 19 aa, Homo sapiens
CAPRHHDIVSGYSNWFDPW

SEQ ID NO: 62904 - protein, 24 aa, Homo sapiens
CARSDRWGYSTSSGDYHYYALDVW

SEQ ID NO: 62905 - protein, 15 aa, Homo sapiens
CARGGIHGGYYFDYW

SEQ ID NO: 62906 - protein, 11 aa, Homo sapiens
CQSYDTSTVIF

SEQ ID NO: 62907 - protein, 10 aa, Homo sapiens
CQQYYSGVSF

SEQ ID NO: 62908 - protein, 15 aa, Homo sapiens
CARAFRVGIVTFDYW

SEQ ID NO: 62909 - protein, 11 aa, Homo sapiens
CLQDFHYPLTF

SEQ ID NO: 62910 - protein, 13 aa, Homo sapiens
CGRGGLWFGIDYW

SEQ ID NO: 62911 - protein, 21 aa, Homo sapiens
CAKGYCSGGSCYPITPAFNIW

SEQ ID NO: 62912 - protein, 21 aa, Homo sapiens
CARGRASSSWYEDYYYYMDVW

SEQ ID NO: 62913 - protein, 18 aa, Homo sapiens
CAHRREGSGWYDNYFDYW

SEQ ID NO: 62914 - protein, 16 aa, Homo sapiens
CTTVDDFWSVSYMDVW

SEQ ID NO: 62915 - protein, 15 aa, Homo sapiens
CARTGIAARWGFDPW

SEQ ID NO: 62916 - protein, 16 aa, Homo sapiens
CARFRYNWNELSFDYW

SEQ ID NO: 62917 - protein, 19 aa, Homo sapiens
CAGVDPGARTSDYYYMDVW

SEQ ID NO: 62918 - protein, 17 aa, Homo sapiens
CARTPLTRREHWFFDLW

SEQ ID NO: 62919 - protein, 15 aa, Homo sapiens
CARRYDFWSTRFDPW

SEQ ID NO: 62920 - protein, 17 aa, Homo sapiens
CAGHYDLTNYYYGMDVW

SEQ ID NO: 62921 - protein, 14 aa, Homo sapiens
CAGGLPGWYYFALW

SEQ ID NO: 62922 - protein, 20 aa, Homo sapiens
CASLLPPHCTNGVCTEGDYW

SEQ ID NO: 62923 - protein, 21 aa, Homo sapiens
CAKDGSTGFCTISNCYDFDYW

SEQ ID NO: 62924 - protein, 16 aa, Homo sapiens
CVKDKHLAVAGTLDYW

SEQ ID NO: 62925 - protein, 19 aa, Homo sapiens
CARHLPWFGELLDGYFDLW

SEQ ID NO: 62926 - protein, 20 aa, Homo sapiens
CAKDSPWYSSGWYRYAFDIW

SEQ ID NO: 62927 - protein, 23 aa, Homo sapiens
CAKDGQDEHADPDYSSSGYLDLW

SEQ ID NO: 62928 - protein, 18 aa, Homo sapiens
CARSAILMIRGVMSFQYW

SEQ ID NO: 62929 - protein, 28 aa, Homo sapiens
CARQGPREPQYHEVLTDSYPPGDWFDPW

SEQ ID NO: 62930 - protein, 19 aa, Homo sapiens
CAKDQSWYYYDSSGHFDYW

SEQ ID NO: 62931 - protein, 17 aa, Homo sapiens
CARGPEIAVAEGAFDIW

SEQ ID NO: 62932 - protein, 23 aa, Homo sapiens
CARDILVTYYDFWSGESLWFDPW

SEQ ID NO: 62933 - protein, 14 aa, Homo sapiens
CARDRLVTTWLDYW

SEQ ID NO: 62934 - protein, 23 aa, Homo sapiens
CARQSGGELKLPCSSTTCPLDYW

SEQ ID NO: 62935 - protein, 23 aa, Homo sapiens
CARGRRRITIFGVALGTSWFDPW

SEQ ID NO: 62936 - protein, 25 aa, Homo sapiens
CARDAASVDTAMATTRYYYYGMDVW

SEQ ID NO: 62937 - protein, 13 aa, Homo sapiens
CTMEDFANFFDYW

SEQ ID NO: 62938 - protein, 17 aa, Homo sapiens
CARVKSVGTSFDAFDIW

SEQ ID NO: 62939 - protein, 23 aa, Homo sapiens
CAKDHIYYDGSGYYLGFRFLDYW

SEQ ID NO: 62940 - protein, 14 aa, Homo sapiens
CVSGSPRPDWFGSW

SEQ ID NO: 62941 - protein, 17 aa, Homo sapiens
CVRQIWFGEFPNWFDSW

SEQ ID NO: 62942 - protein, 27 aa, Homo sapiens
CARDPGHVVRFYDFWTGSSQPYYFDYW

SEQ ID NO: 62943 - protein, 19 aa, Homo sapiens
CARPAFPVSDTDFDPFEIW

SEQ ID NO: 62944 - protein, 21 aa, Homo sapiens
CAKEGYCSGAGCSVGSHFDHW

SEQ ID NO: 62945 - protein, 22 aa, Homo sapiens
CARDEGNAGIFGVVKTNWFDPW

SEQ ID NO: 62946 - protein, 17 aa, Homo sapiens
CAKQGDSSGYNGGFDYW

SEQ ID NO: 62947 - protein, 17 aa, Homo sapiens
CARDVTALHRSNSFDKW

SEQ ID NO: 62948 - protein, 18 aa, Homo sapiens
CAKDLSTVTYYFYGMDVW

SEQ ID NO: 62949 - protein, 14 aa, Homo sapiens
CAKPHTLGHAFDIW

SEQ ID NO: 62950 - protein, 18 aa, Homo sapiens
CARRRYDIFTAYHDFDLW

SEQ ID NO: 62951 - protein, 18 aa, Homo sapiens
CTTVYYDILTGYGGMDYW

SEQ ID NO: 62952 - protein, 16 aa, Homo sapiens
CVKQGYLSVRSYFDYW

SEQ ID NO: 62953 - protein, 27 aa, Homo sapiens
CAKEAYFYGSGSFYSGDYYYYYYMDVW

SEQ ID NO: 62954 - protein, 20 aa, Homo sapiens
CARDALYSSSRLYYYGMDVW

SEQ ID NO: 62955 - protein, 18 aa, Homo sapiens
CAKTTRIAVAGLRYFDYW

SEQ ID NO: 62956 - protein, 23 aa, Homo sapiens
CARHTSGLSDSVVVPASNAFDLW

SEQ ID NO: 62957 - protein, 12 aa, Homo sapiens
CQQSYRTLRYSF

SEQ ID NO: 62958 - protein, 18 aa, Homo sapiens
CARVGPAGAKKFWFFDLW

SEQ ID NO: 62959 - protein, 13 aa, Homo sapiens
CARNGIVAGFDHW

SEQ ID NO: 62960 - protein, 14 aa, Homo sapiens
CARVATVTPGSDYW

SEQ ID NO: 62961 - protein, 22 aa, Homo sapiens
CAKDRGYSAGFPNYYYDGMDVW

SEQ ID NO: 62962 - protein, 13 aa, Homo sapiens
CASRGSYSPRDYW

SEQ ID NO: 62963 - protein, 17 aa, Homo sapiens
CAKVAQLSRPHRYFDLW

SEQ ID NO: 62964 - protein, 20 aa, Homo sapiens
CARHFRRIAARLPSCWFDPW

SEQ ID NO: 62965 - protein, 21 aa, Homo sapiens
CARDYGGNGTFYYYYYGMDVW

SEQ ID NO: 62966 - protein, 14 aa, Homo sapiens
CVSEDTPMITGDYW

SEQ ID NO: 62967 - protein, 22 aa, Homo sapiens
CARWHNGTGFYWGEAASAFDYW

SEQ ID NO: 62968 - protein, 21 aa, Homo sapiens
CGKDVKDGFDSYGYWDAFDVW

SEQ ID NO: 62969 - protein, 15 aa, Homo sapiens
CARSNSLTYNWFDPW

SEQ ID NO: 62970 - protein, 14 aa, Homo sapiens
CQQSYSTPPSGLTF

SEQ ID NO: 62971 - protein, 23 aa, Homo sapiens
CARARHASYYDFWSGYFGPFDPW

SEQ ID NO: 62972 - protein, 18 aa, Homo sapiens
CATKAPTGGIDYWYFDLW

SEQ ID NO: 62973 - protein, 20 aa, Homo sapiens
CARYYYGPRSYDYGPIFDSW

SEQ ID NO: 62974 - protein, 14 aa, Homo sapiens
CARKPSGDDAFDLW

SEQ ID NO: 62975 - protein, 21 aa, Homo sapiens
CARDALERNWNASYYYGMDVW

SEQ ID NO: 62976 - protein, 13 aa, Homo sapiens
CARISTSGSSDYW

SEQ ID NO: 62977 - protein, 19 aa, Homo sapiens
CAKDRRAVVVAATPWFDPW

SEQ ID NO: 62978 - protein, 17 aa, Homo sapiens
CARESYLTYIYYGMDVW

SEQ ID NO: 62979 - protein, 20 aa, Homo sapiens
CARVEMVTKFILDDSWFDPW

SEQ ID NO: 62980 - protein, 18 aa, Homo sapiens
CAKRSHMYSSGYYWVDYW

SEQ ID NO: 62981 - protein, 14 aa, Homo sapiens
CQSYDSPLDGSWVF

SEQ ID NO: 62982 - protein, 19 aa, Homo sapiens
CARVRILEYSSSPNWFDPW

SEQ ID NO: 62983 - protein, 23 aa, Homo sapiens
CARDSLVPAASVDYYYYYGMDVW

SEQ ID NO: 62984 - protein, 14 aa, Homo sapiens
CARDRGRPDAFDLW

SEQ ID NO: 62985 - protein, 22 aa, Homo sapiens
CARVGIAARQGLRYYYYGMDVW

SEQ ID NO: 62986 - protein, 14 aa, Homo sapiens
CAHRQALLDAFDIW

SEQ ID NO: 62987 - protein, 20 aa, Homo sapiens
CARDREEFGEDNYYYYMDVW

SEQ ID NO: 62988 - protein, 31 aa, Homo sapiens
CARDREEYDFWGGYYGRPKGKPRHRWDFDLW

SEQ ID NO: 62989 - protein, 17 aa, Homo sapiens
CARHKKSQARVTPLDYW

SEQ ID NO: 62990 - protein, 24 aa, Homo sapiens
CARGNYYSDTSSGYYGMDRLPDYW

SEQ ID NO: 62991 - protein, 12 aa, Homo sapiens
CQQYGNCPIYTF

SEQ ID NO: 62992 - protein, 21 aa, Homo sapiens
CAREYDIGADLTTVTTAWDYW

SEQ ID NO: 62993 - protein, 20 aa, Homo sapiens
CAKARGIFMLYAAYYGFDVW

SEQ ID NO: 62994 - protein, 24 aa, Homo sapiens
CARAVPDDFWSGYFYYYYYYMDVW

SEQ ID NO: 62995 - protein, 19 aa, Homo sapiens
CAKVMVGYVLMVRGYMDVW

SEQ ID NO: 62996 - protein, 19 aa, Homo sapiens
CAKEGLEGLLEAYYAMDVW

SEQ ID NO: 62997 - protein, 19 aa, Homo sapiens
CARHHYIIFGILIDYFDYW

SEQ ID NO: 62998 - protein, 14 aa, Homo sapiens
CSSYTSSTTLDMIF

SEQ ID NO: 62999 - protein, 16 aa, Homo sapiens
CARVITAGSDWYFDLW

SEQ ID NO: 63000 - protein, 15 aa, Homo sapiens
CARTNIAVAVSFDYW

SEQ ID NO: 63001 - protein, 20 aa, Homo sapiens
CARGPLKLRAGLVPTWFDPW

SEQ ID NO: 63002 - protein, 18 aa, Homo sapiens
CAKDQGWYSSSSGYFDYW

SEQ ID NO: 63003 - protein, 24 aa, Homo sapiens
CARGYAYYDTTGYYYQGAYGFDIW

SEQ ID NO: 63004 - protein, 18 aa, Homo sapiens
CARDSYGQLWSNDAFDIW

SEQ ID NO: 63005 - protein, 21 aa, Homo sapiens
CARVAVSMIVVVVTGGAFDIW

SEQ ID NO: 63006 - protein, 16 aa, Homo sapiens
CTKDKTWDPLGYFAYW

SEQ ID NO: 63007 - protein, 14 aa, Homo sapiens
CAREMVRGVIIDYW

SEQ ID NO: 63008 - protein, 14 aa, Homo sapiens
CQSYDNSLSAFFVF

SEQ ID NO: 63009 - protein, 17 aa, Homo sapiens
CAKEYGDHYRGDWFDPW

SEQ ID NO: 63010 - protein, 21 aa, Homo sapiens
CAKDREGVDPGVYYYYGMDVW

SEQ ID NO: 63011 - protein, 23 aa, Homo sapiens
CARRAYIVQNRKTDYYYYYMDVW

SEQ ID NO: 63012 - protein, 17 aa, Homo sapiens
CAKGDSSHWYSFAFDMW

SEQ ID NO: 63013 - protein, 21 aa, Homo sapiens
CAREVQDYYDFWSGYYAFDIW

SEQ ID NO: 63014 - protein, 11 aa, Homo sapiens
CQEYNGYSFAF

SEQ ID NO: 63015 - protein, 13 aa, Homo sapiens
CQAWGSTTAGVTF

SEQ ID NO: 63016 - protein, 22 aa, Homo sapiens
CARDNGYDSSGDWGGDDAFDIW

SEQ ID NO: 63017 - protein, 22 aa, Homo sapiens
CARDRSAGYFDTTGFRDAFDMW

SEQ ID NO: 63018 - protein, 15 aa, Homo sapiens
CAKDGRVYSSSFDYW

SEQ ID NO: 63019 - protein, 22 aa, Homo sapiens
CARGRIAAAVAADYYYYGMDVW

SEQ ID NO: 63020 - protein, 20 aa, Homo sapiens
CVRDRGYCTGGICYAVFDYW

SEQ ID NO: 63021 - protein, 21 aa, Homo sapiens
CATGPPYCSSTSCQNNWFDPW

SEQ ID NO: 63022 - protein, 18 aa, Homo sapiens
CARHVGAARRSLGWFDPW

SEQ ID NO: 63023 - protein, 18 aa, Homo sapiens
CARGAMVAAATRFAFDIW

SEQ ID NO: 63024 - protein, 23 aa, Homo sapiens
CARHRLPDRFGELFRYYYGMDVW

SEQ ID NO: 63025 - protein, 23 aa, Homo sapiens
CARGPRLWYDILTGYYRGWFDPW

SEQ ID NO: 63026 - protein, 28 aa, Homo sapiens
CAREKWTASHYYDSSGYEAKLYNWFDPW

SEQ ID NO: 63027 - protein, 21 aa, Homo sapiens
CARGRLVVAAAGNYYYYMDVW

SEQ ID NO: 63028 - protein, 21 aa, Homo sapiens
CARGGWKYQLQIYYYYGMDVW

SEQ ID NO: 63029 - protein, 20 aa, Homo sapiens
CARPGRSLRWSLSYFFFDFW

SEQ ID NO: 63030 - protein, 20 aa, Homo sapiens
CARYHIEVISDGLLHWFDPW

SEQ ID NO: 63031 - protein, 12 aa, Homo sapiens
CQSYDDNNPVVF

SEQ ID NO: 63032 - protein, 16 aa, Homo sapiens
CARGVGVATISVFDYW

SEQ ID NO: 63033 - protein, 24 aa, Homo sapiens
CAKSYCSGGSCYLHYYYYYGMDVW

SEQ ID NO: 63034 - protein, 15 aa, Homo sapiens
CARSWLGTPQHFDSW

SEQ ID NO: 63035 - protein, 17 aa, Homo sapiens
CARLEKYYGSGSLFDYW

SEQ ID NO: 63036 - protein, 21 aa, Homo sapiens
CAKDYGNCRGGRCYSDPFDYW

SEQ ID NO: 63037 - protein, 25 aa, Homo sapiens
CTTDPYHELKRITIFGVVIIGFDYW

SEQ ID NO: 63038 - protein, 21 aa, Homo sapiens
CARLYGIVVLPAAMNNWFDPW

SEQ ID NO: 63039 - protein, 18 aa, Homo sapiens
CARDGERYTYGYDSFDIW

SEQ ID NO: 63040 - protein, 14 aa, Homo sapiens
CAFNPLDGPYFDYW

SEQ ID NO: 63041 - protein, 18 aa, Homo sapiens
CARDPEDHWDYYYGMDVW

SEQ ID NO: 63042 - protein, 22 aa, Homo sapiens
CARDPPQGGNGKYYYYYFLDVW

SEQ ID NO: 63043 - protein, 15 aa, Homo sapiens
CTRDGGPGDVALDYW

SEQ ID NO: 63044 - protein, 10 aa, Homo sapiens
CQRLNSYLTF

SEQ ID NO: 63045 - protein, 18 aa, Homo sapiens
CARGHMTTVTTGCAFDIW

SEQ ID NO: 63046 - protein, 12 aa, Homo sapiens
CARLNSDAFDIW

SEQ ID NO: 63047 - protein, 18 aa, Homo sapiens
CARHNYAVLNGDDAFDIW

SEQ ID NO: 63048 - protein, 21 aa, Homo sapiens
CAHSKRRPSCSGGKCYYFDYW

SEQ ID NO: 63049 - protein, 15 aa, Homo sapiens
CYSRDSSGDHSPWVF

SEQ ID NO: 63050 - protein, 20 aa, Homo sapiens
CARDPHYDYVWGSFGYMDVW

SEQ ID NO: 63051 - protein, 16 aa, Homo sapiens
CAREGIVATITGLDYW

SEQ ID NO: 63052 - protein, 24 aa, Homo sapiens
CARLSGLRFLEWTSYYYYYYMDVW

SEQ ID NO: 63053 - protein, 18 aa, Homo sapiens
CARDPGYSGPTRWYFDLW

SEQ ID NO: 63054 - protein, 15 aa, Homo sapiens
CALTQIYSYGAFDYW

SEQ ID NO: 63055 - protein, 16 aa, Homo sapiens
CARDQAAAGKSHFDYW

SEQ ID NO: 63056 - protein, 12 aa, Homo sapiens
CQHYYSYSPWTF

SEQ ID NO: 63057 - protein, 11 aa, Homo sapiens
CQQHDNLRLTF

SEQ ID NO: 63058 - protein, 16 aa, Homo sapiens
CARKRETGYDAYLDYW

SEQ ID NO: 63059 - protein, 20 aa, Homo sapiens
CAAPDEYSNYGGRFDAFDFW

SEQ ID NO: 63060 - protein, 20 aa, Homo sapiens
CARTCWGYRYYYYYYGMDVW

SEQ ID NO: 63061 - protein, 17 aa, Homo sapiens
CVKGYYDILTEAAFDIW

SEQ ID NO: 63062 - protein, 19 aa, Homo sapiens
CAKGSYYDILTGYYGLDYW

SEQ ID NO: 63063 - protein, 21 aa, Homo sapiens
CARDEYDCSSMTCFSKWLDPW

SEQ ID NO: 63064 - protein, 24 aa, Homo sapiens
CARLERYYDILRGNYYYYYYMDVW

SEQ ID NO: 63065 - protein, 22 aa, Homo sapiens
CARDVRRHNRFWSGDYYYMDVW

SEQ ID NO: 63066 - protein, 9 aa, Homo sapiens
CTTTEFDPW

SEQ ID NO: 63067 - protein, 14 aa, Homo sapiens
CARFGELEYFFDYW

SEQ ID NO: 63068 - protein, 24 aa, Homo sapiens
CARDFYSSSSTEGGYYYYYGMDVW

SEQ ID NO: 63069 - protein, 15 aa, Homo sapiens
CASGGGYSGSYFDYW

SEQ ID NO: 63070 - protein, 25 aa, Homo sapiens
CARDILTRQLVHTESYYYYYGMDVW

SEQ ID NO: 63071 - protein, 16 aa, Homo sapiens
CARESTATGYNWFDPW

SEQ ID NO: 63072 - protein, 21 aa, Homo sapiens
CARDIGFGELSVYYYYGMDVW

SEQ ID NO: 63073 - protein, 21 aa, Homo sapiens
CAKVRSRVYDFWSGPYYFDYW

SEQ ID NO: 63074 - protein, 23 aa, Homo sapiens
CARDRYSDIVATKGTYYYGMDVW

SEQ ID NO: 63075 - protein, 22 aa, Homo sapiens
CAKDPTTTIFGVVIDQYYFDYW

SEQ ID NO: 63076 - protein, 18 aa, Homo sapiens
CAKGGWGYSSSPYYFDYW

SEQ ID NO: 63077 - protein, 16 aa, Homo sapiens
CARSVRLVTGRAFDSW

SEQ ID NO: 63078 - protein, 20 aa, Homo sapiens
CARQRGSSGWSRGSDAYDIW

SEQ ID NO: 63079 - protein, 21 aa, Homo sapiens
CATDDYRDRHAGPLYDAFDMW

SEQ ID NO: 63080 - protein, 16 aa, Homo sapiens
CARVAGGYSYGHLDYW

SEQ ID NO: 63081 - protein, 23 aa, Homo sapiens
CTTDVLRFLEWSTFNYYYYMDVW

SEQ ID NO: 63082 - protein, 17 aa, Homo sapiens
CARECSGASCYLGSDYW

SEQ ID NO: 63083 - protein, 21 aa, Homo sapiens
CTRHVHQVRGTTHYYYYMDIW

SEQ ID NO: 63084 - protein, 19 aa, Homo sapiens
CAKDPAWLRLYPNNWFDPW

SEQ ID NO: 63085 - protein, 25 aa, Homo sapiens
CVRENTMIPDAVVFQAREHYAMDVW

SEQ ID NO: 63086 - protein, 18 aa, Homo sapiens
CASVPGIAVAGIIGGDYW

SEQ ID NO: 63087 - protein, 20 aa, Homo sapiens
CGRSGDYYFGSGFSYYLDYW

SEQ ID NO: 63088 - protein, 23 aa, Homo sapiens
CARDMRSITGTVYYYYYYGMDVW

SEQ ID NO: 63089 - protein, 14 aa, Homo sapiens
CASLGVLYADKDYW

SEQ ID NO: 63090 - protein, 15 aa, Homo sapiens
CAREGFANSGYFQHW

SEQ ID NO: 63091 - protein, 11 aa, Homo sapiens
CTQGTQLPLSF

SEQ ID NO: 63092 - protein, 15 aa, Homo sapiens
CARDICTTTSCFDHW

SEQ ID NO: 63093 - protein, 17 aa, Homo sapiens
CSRGNSGWYYYHYMDVW

SEQ ID NO: 63094 - protein, 22 aa, Homo sapiens
CASQATSAFSFGYTSDNWFDPW

SEQ ID NO: 63095 - protein, 17 aa, Homo sapiens
CARPRGGNGGSSPFDQW

SEQ ID NO: 63096 - protein, 14 aa, Homo sapiens
CARDERGSWYFDLW

SEQ ID NO: 63097 - protein, 22 aa, Homo sapiens
CAKSKGGGYGPGFRWYNWFDSW

SEQ ID NO: 63098 - protein, 22 aa, Homo sapiens
CVVGGCTNRVCVSILGNHFDYW

SEQ ID NO: 63099 - protein, 18 aa, Homo sapiens
CAKDWYGDQYYYYGMDVW

SEQ ID NO: 63100 - protein, 18 aa, Homo sapiens
CATEPGMVWLAPSPRDYW

SEQ ID NO: 63101 - protein, 20 aa, Homo sapiens
CARFQSSGWYKRFGSAFDFW

SEQ ID NO: 63102 - protein, 14 aa, Homo sapiens
CARDLWLVRTFDIW

SEQ ID NO: 63103 - protein, 18 aa, Homo sapiens
CAKDLSLDYDFWSGPDYW

SEQ ID NO: 63104 - protein, 17 aa, Homo sapiens
CARFFPTTYGVGGFDIW

SEQ ID NO: 63105 - protein, 17 aa, Homo sapiens
CARGPLWSGNPYYFDFW

SEQ ID NO: 63106 - protein, 27 aa, Homo sapiens
CTTDLFSGDCRDGNCRFTYFHDAFDIW

SEQ ID NO: 63107 - protein, 13 aa, Homo sapiens
CARDAGVSKFDSW

SEQ ID NO: 63108 - protein, 16 aa, Homo sapiens
CQQYENLPPESYTLTF

SEQ ID NO: 63109 - protein, 23 aa, Homo sapiens
CARDRLLWFGEFDYYYYYGMDVW

SEQ ID NO: 63110 - protein, 18 aa, Homo sapiens
CAKLGVYGDYRPIDFDYW

SEQ ID NO: 63111 - protein, 15 aa, Homo sapiens
CARGLTGASGGFDIW

SEQ ID NO: 63112 - protein, 18 aa, Homo sapiens
CARTPWDGYNQPPHFDYW

SEQ ID NO: 63113 - protein, 17 aa, Homo sapiens
CARNLGERRVAGGFDYW

SEQ ID NO: 63114 - protein, 18 aa, Homo sapiens
CAKESQWEQLVEYYFDYW

SEQ ID NO: 63115 - protein, 15 aa, Homo sapiens
CARDLEAVVAASDYW

SEQ ID NO: 63116 - protein, 21 aa, Homo sapiens
CARDSYSSSSFDYYYYGMDVW

SEQ ID NO: 63117 - protein, 18 aa, Homo sapiens
CTKGREYSGYAPLGLDYW

SEQ ID NO: 63118 - protein, 19 aa, Homo sapiens
CARIREYGYGSIYWYFDLW

SEQ ID NO: 63119 - protein, 18 aa, Homo sapiens
CARNYDYVWGKPGPFDDW

SEQ ID NO: 63120 - protein, 16 aa, Homo sapiens
CAKVTGIGITSPFDYW

SEQ ID NO: 63121 - protein, 18 aa, Homo sapiens
CAKVGKQQLPPYDAFDIW

SEQ ID NO: 63122 - protein, 25 aa, Homo sapiens
CARDWGSLRGIAAHQYYYYYGMDVW

SEQ ID NO: 63123 - protein, 29 aa, Homo sapiens
CARVVNEENIIEIPGSLPGFSYYYYMDIW

SEQ ID NO: 63124 - protein, 19 aa, Homo sapiens
CAKVSYYYDSSGYLEFDPW

SEQ ID NO: 63125 - protein, 27 aa, Homo sapiens
CAKDFTGQTQRFRVRRLLAVGPYFDYW

SEQ ID NO: 63126 - protein, 16 aa, Homo sapiens
CAKEGVSAAGRYFDLW

SEQ ID NO: 63127 - protein, 19 aa, Homo sapiens
CARDGVISSGGSIDAFDLW

SEQ ID NO: 63128 - protein, 17 aa, Homo sapiens
CARDPEYTSSGVAFDIW

SEQ ID NO: 63129 - protein, 16 aa, Homo sapiens
CARSVYGWGSQPFDFW

SEQ ID NO: 63130 - protein, 15 aa, Homo sapiens
CQSYDSTLSRPHVAF

SEQ ID NO: 63131 - protein, 17 aa, Homo sapiens
CARERRFLIPDDAFDIW

SEQ ID NO: 63132 - protein, 14 aa, Homo sapiens
CAAWDDNRSGSFVF

SEQ ID NO: 63133 - protein, 18 aa, Homo sapiens
CAKDRATIDHYYYGMDVW

SEQ ID NO: 63134 - protein, 19 aa, Homo sapiens
CARDRGRWLISTVDAFDVW

SEQ ID NO: 63135 - protein, 12 aa, Homo sapiens [sequence omitted]

SEQ ID NO: 63136 - protein, 20 aa, Homo sapiens
CARDGIAAAGLYYYYGMDVW

SEQ ID NO: 63137 - protein, 19 aa, Homo sapiens
CTRAGGFTMVRQHNWFDPW

SEQ ID NO: 63138 - protein, 14 aa, Homo sapiens
CASSAAPGGVLDYW

SEQ ID NO: 63139 - protein, 20 aa, Homo sapiens
CAKYREVFHLSWGADAFDIW

SEQ ID NO: 63140 - protein, 20 aa, Homo sapiens
CARFPLGYSSGWSFQVFDYW

SEQ ID NO: 63141 - protein, 16 aa, Homo sapiens
CAKSDPAMTNGALDIW

SEQ ID NO: 63142 - protein, 17 aa, Homo sapiens
CARVHSNGWYADWFDPW

SEQ ID NO: 63143 - protein, 16 aa, Homo sapiens
CARETGEYSSSFVDYW

SEQ ID NO: 63144 - protein, 13 aa, Homo sapiens
CARTGVDTAPDYW

SEQ ID NO: 63145 - protein, 27 aa, Homo sapiens
CAHSGELAAATPDGDTYYYYYYYMDVW

SEQ ID NO: 63146 - protein, 13 aa, Homo sapiens
CQQRDNWPRIVTF

SEQ ID NO: 63147 - protein, 20 aa, Homo sapiens
CARARLGYSSSWYGYYFDYW

SEQ ID NO: 63148 - protein, 11 aa, Homo sapiens [sequence omitted]

SEQ ID NO: 63149 - protein, 14 aa, Homo sapiens
CAKDYSTTWYMDYW

SEQ ID NO: 63150 - protein, 19 aa, Homo sapiens
CARGLSVGYYGSGSAFDPW

SEQ ID NO: 63151 - protein, 25 aa, Homo sapiens
CARVENDCDGTRCFVSTYYYYMDVW

SEQ ID NO: 63152 - protein, 18 aa, Homo sapiens
CARGARYGSSSRLKFDYW

SEQ ID NO: 63153 - protein, 23 aa, Homo sapiens
CVRQTKPGMYFSSHGSPYYFDDW

SEQ ID NO: 63154 - protein, 17 aa, Homo sapiens
CAREGKTMELAGTFDYW

SEQ ID NO: 63155 - protein, 20 aa, Homo sapiens
CARQGSSSLTYYYYYGMDVW

SEQ ID NO: 63156 - protein, 15 aa, Homo sapiens
CANTIYIGASPFDYW

SEQ ID NO: 63157 - protein, 19 aa, Homo sapiens
CVKDSTHYFDLSGSPFDYW

SEQ ID NO: 63158 - protein, 16 aa, Homo sapiens
CARDGIQLWFYYFDYW

SEQ ID NO: 63159 - protein, 18 aa, Homo sapiens
CARSRVGATLRTNWFDPW

SEQ ID NO: 63160 - protein, 17 aa, Homo sapiens
CARGNRDGYNFIGFDPW

SEQ ID NO: 63161 - protein, 12 aa, Homo sapiens
CARWLHLGNDYW

SEQ ID NO: 63162 - protein, 23 aa, Homo sapiens
CAKLPTSQRSSSWLPKPGYFDYW

SEQ ID NO: 63163 - protein, 16 aa, Homo sapiens
CTTDTYDFWSGATDYW

SEQ ID NO: 63164 - protein, 15 aa, Homo sapiens
CTKDDSSGCYWGDYW

SEQ ID NO: 63165 - protein, 20 aa, Homo sapiens
CAGGLDIVTDYRWRYFFDSW

SEQ ID NO: 63166 - protein, 15 aa, Homo sapiens
CARARRYYDSRFDSW

SEQ ID NO: 63167 - protein, 31 aa, Homo sapiens
CARDYVGGKYDYGDYEGAGPDYYYYYYMDVW

SEQ ID NO: 63168 - protein, 19 aa, Homo sapiens
CASRTGTTSEYYYYGMDVW

SEQ ID NO: 63169 - protein, 19 aa, Homo sapiens
CARAETYYDLLTTYYSDYW

SEQ ID NO: 63170 - protein, 20 aa, Homo sapiens
CARAVPSNDSSVLEGAFDIW

SEQ ID NO: 63171 - protein, 18 aa, Homo sapiens
CARDRGMWELWAYYFDYW

SEQ ID NO: 63172 - protein, 24 aa, Homo sapiens
CARADIVVVPALPRYYYYYYMDVW

SEQ ID NO: 63173 - protein, 16 aa, Homo sapiens
CAKDGYSDGWDTLDYW

SEQ ID NO: 63174 - protein, 16 aa, Homo sapiens
CASSWLGSYYYGMDVW

SEQ ID NO: 63175 - protein, 19 aa, Homo sapiens
CAHAYSSGWYGRWNWFDPW

SEQ ID NO: 63176 - protein, 18 aa, Homo sapiens
CVRDHDLWGGIVDYFDHW

SEQ ID NO: 63177 - protein, 19 aa, Homo sapiens
CARRVGWSNSSYHHAFNIW

SEQ ID NO: 63178 - protein, 17 aa, Homo sapiens
CVRHEPRTAPGSHCDYW

SEQ ID NO: 63179 - protein, 12 aa, Homo sapiens
CAFFLSSSYDYW

SEQ ID NO: 63180 - protein, 24 aa, Homo sapiens
CATEGTLGNPAMDDYGDYGYFEYW

SEQ ID NO: 63181 - protein, 16 aa, Homo sapiens
CARADTSMVPYFFDYW

SEQ ID NO: 63182 - protein, 14 aa, Homo sapiens
CVKESLVRRYFDSW

SEQ ID NO: 63183 - protein, 14 aa, Homo sapiens
CQVWDSSGDPRGVF

SEQ ID NO: 63184 - protein, 25 aa, Homo sapiens
CARHVRRGTLLSGPAGYYYYYLDVW

SEQ ID NO: 63185 - protein, 19 aa, Homo sapiens
CAREARRTTVTPHDSFDMW

SEQ ID NO: 63186 - protein, 19 aa, Homo sapiens
CAHSREYFGSGRFSLFDYW

SEQ ID NO: 63187 - protein, 18 aa, Homo sapiens
CARDGVGATTFYGFLDYW

SEQ ID NO: 63188 - protein, 18 aa, Homo sapiens
CARAEMTMVRGVMPVDYW

SEQ ID NO: 63189 - protein, 21 aa, Homo sapiens
CARHGKGSIGCSGGSCYFDHW

SEQ ID NO: 63190 - protein, 18 aa, Homo sapiens
CAKSSNLYYYYYYYMDVW

SEQ ID NO: 63191 - protein, 18 aa, Homo sapiens
CAREDSSDYIREYYFDYW

SEQ ID NO: 63192 - protein, 25 aa, Homo sapiens
CAKDSGPLPLLYTGSYYRPYSFDSW

SEQ ID NO: 63193 - protein, 16 aa, Homo sapiens
CARDPIMGTGNKFDFW

SEQ ID NO: 63194 - protein, 12 aa, Homo sapiens
CQQHGSSSTWTF

SEQ ID NO: 63195 - protein, 18 aa, Homo sapiens
CASTYYYDSSGYRYFDYW

SEQ ID NO: 63196 - protein, 20 aa, Homo sapiens
CAKGDVKGRPFYYYYYMDVW

SEQ ID NO: 63197 - protein, 20 aa, Homo sapiens
CARGAPMDDFWTVKDAFEIW

SEQ ID NO: 63198 - protein, 16 aa, Homo sapiens
CARCPYDFWSGPVDYW

SEQ ID NO: 63199 - protein, 21 aa, Homo sapiens
CAKDLSPFLMITFGEDAFDIW

SEQ ID NO: 63200 - protein, 14 aa, Homo sapiens
CASSGWTRSGVDYW

SEQ ID NO: 63201 - protein, 15 aa, Homo sapiens
CARHGGGWNDAFDVW

SEQ ID NO: 63202 - protein, 17 aa, Homo sapiens
CAKDIDASSSWYTFDYW

SEQ ID NO: 63203 - protein, 13 aa, Homo sapiens
CARDPNTRFFDYW

SEQ ID NO: 63204 - protein, 18 aa, Homo sapiens
CAKDLHYDFWSGLQFDPW

SEQ ID NO: 63205 - protein, 26 aa, Homo sapiens
CARDFYVPEPIVATIGGYYYYGMDVW

SEQ ID NO: 63206 - protein, 24 aa, Homo sapiens
CARGRNPPGYCSGGSCYSAAFDIW

SEQ ID NO: 63207 - protein, 16 aa, Homo sapiens
CARDREGAYSYTYDYW

SEQ ID NO: 63208 - protein, 19 aa, Homo sapiens
CASRITIFGVVKNDAFDIW

SEQ ID NO: 63209 - protein, 21 aa, Homo sapiens
CARKAPYSSGWYPHGNGFDPW

SEQ ID NO: 63210 - protein, 22 aa, Homo sapiens
CAKDSPYSSGWGYYYYYGMDVW

SEQ ID NO: 63211 - protein, 11 aa, Homo sapiens
CAVIAAGFDIW

SEQ ID NO: 63212 - protein, 17 aa, Homo sapiens
CAKVLSRIEGVDAFDLW

SEQ ID NO: 63213 - protein, 19 aa, Homo sapiens
CARDVSYECRGGGCWLDYW

SEQ ID NO: 63214 - protein, 17 aa, Homo sapiens
CARDYGSGSYPTLFDYW

SEQ ID NO: 63215 - protein, 17 aa, Homo sapiens
CARSAGNHYYYYPMDVW

SEQ ID NO: 63216 - protein, 25 aa, Homo sapiens
CAKGGYFDFDFWSGYPYYYYYMDVW

SEQ ID NO: 63217 - protein, 23 aa, Homo sapiens
CARDGVAATPIVTKYYYYGMDVW

SEQ ID NO: 63218 - protein, 13 aa, Homo sapiens
CARSESGSYGGYW

SEQ ID NO: 63219 - protein, 22 aa, Homo sapiens
CARHKTSYAYDNSGYPSYFDYW

SEQ ID NO: 63220 - protein, 22 aa, Homo sapiens
CAKGGGPYCSGGSCYWTYFDYW

SEQ ID NO: 63221 - protein, 11 aa, Homo sapiens
CMQSLMLPIAF

SEQ ID NO: 63222 - protein, 11 aa, Homo sapiens
CMHRIEFPWTF

SEQ ID NO: 63223 - protein, 12 aa, Homo sapiens
CLQTYSTPTWTF

SEQ ID NO: 63224 - protein, 20 aa, Homo sapiens
CTTDCIRLGELSSDDAFDIW

SEQ ID NO: 63225 - protein, 17 aa, Homo sapiens
CARGLRGSYYYYYMDVW

SEQ ID NO: 63226 - protein, 15 aa, Homo sapiens
CARGSAHRPYYIDNW

SEQ ID NO: 63227 - protein, 25 aa, Homo sapiens
CARLGYEYVWGSYRDSYYYYGMDVW

SEQ ID NO: 63228 - protein, 24 aa, Homo sapiens
CAKDVLRVRFLDPTIYYYYGMDVW

SEQ ID NO: 63229 - protein, 16 aa, Homo sapiens
CARGPDSSVFGAFDIW

SEQ ID NO: 63230 - protein, 19 aa, Homo sapiens
CASLVEVFSSGSNGAFDIW

SEQ ID NO: 63231 - protein, 20 aa, Homo sapiens
CARGGPAPRRPYYYYGMDVW

SEQ ID NO: 63232 - protein, 19 aa, Homo sapiens
CAKEKLISGFMDHYYMDVW

SEQ ID NO: 63233 - protein, 18 aa, Homo sapiens
CAKEDDTSGYAESYFDHW

SEQ ID NO: 63234 - protein, 17 aa, Homo sapiens
CAKGPQYSSGWYYFDYW

SEQ ID NO: 63235 - protein, 13 aa, Homo sapiens
CQSYDVTNREWVF

SEQ ID NO: 63236 - protein, 17 aa, Homo sapiens
CARDSSARGPIDAFDIW

SEQ ID NO: 63237 - protein, 13 aa, Homo sapiens
CARCESYNWLDPW

SEQ ID NO: 63238 - protein, 24 aa, Homo sapiens
CARDRDYYDSSESDRYYYYGMDVW

SEQ ID NO: 63239 - protein, 15 aa, Homo sapiens
CARGGEQLTLYLDSW

SEQ ID NO: 63240 - protein, 19 aa, Homo sapiens
CARRGSEGASSSGDPFDIW

SEQ ID NO: 63241 - protein, 12 aa, Homo sapiens
CARKTYSGLDYW

SEQ ID NO: 63242 - protein, 16 aa, Homo sapiens
CASVFDDYGDYSFDYW

SEQ ID NO: 63243 - protein, 20 aa, Homo sapiens
CARHHRVAYYYDNRNWFDPW

SEQ ID NO: 63244 - protein, 26 aa, Homo sapiens
CARAYWGYCSSTSCPQYYYYYGMDVW

SEQ ID NO: 63245 - protein, 17 aa, Homo sapiens
CARHSSPLATVTPFDYW

SEQ ID NO: 63246 - protein, 17 aa, Homo sapiens
CAKSPGSAGLYYYMDVW

SEQ ID NO: 63247 - protein, 16 aa, Homo sapiens
CARRNYDNYGYWFDTW

SEQ ID NO: 63248 - protein, 19 aa, Homo sapiens
CASEGILTGYSYYYSMDVW

SEQ ID NO: 63249 - protein, 15 aa, Homo sapiens
CAREWGDLASWFDPW

SEQ ID NO: 63250 - protein, 18 aa, Homo sapiens
CVKDAEPIKRTYSYFDSW

SEQ ID NO: 63251 - protein, 17 aa, Homo sapiens
CARESKPPGYYYGMDVW

SEQ ID NO: 63252 - protein, 24 aa, Homo sapiens
CARSPITYGSGSPYYYYYYGMDVW

SEQ ID NO: 63253 - protein, 19 aa, Homo sapiens
CSRVTSYYFQFSGYYPDYW

SEQ ID NO: 63254 - protein, 19 aa, Homo sapiens
CSRDSDFWSGFIDQIFDYW

SEQ ID NO: 63255 - protein, 15 aa, Homo sapiens
CASRSGRWDDYMDVW

SEQ ID NO: 63256 - protein, 24 aa, Homo sapiens
CARDLGSPLLWFGEIKLHWYLDLW

SEQ ID NO: 63257 - protein, 19 aa, Homo sapiens
CARERRVDDFITHWYFDLW

SEQ ID NO: 63258 - protein, 23 aa, Homo sapiens
CARDKPLTTPGLLYYYYYYMDVW

SEQ ID NO: 63259 - protein, 18 aa, Homo sapiens
CASASESVVAASDAFDIW

SEQ ID NO: 63260 - protein, 25 aa, Homo sapiens
CARAEYYDFWSGYYTHYNYYGMDVW

SEQ ID NO: 63261 - protein, 20 aa, Homo sapiens
CTRVEWATQSYYYYYYMDVW

SEQ ID NO: 63262 - protein, 18 aa, Homo sapiens
CARGTYDSSGYYNWFDPW

SEQ ID NO: 63263 - protein, 16 aa, Homo sapiens
CARASVPGTARYFQYW

SEQ ID NO: 63264 - protein, 15 aa, Homo sapiens
CARGEYTSSSPFGYW

SEQ ID NO: 63265 - protein, 20 aa, Homo sapiens
CARDPGYSNYGQYNWYFDLW

SEQ ID NO: 63266 - protein, 18 aa, Homo sapiens
CARGPPYCSGGTCLVDYW

SEQ ID NO: 63267 - protein, 23 aa, Homo sapiens
CAREVDYGSGSETYYYYYGMDVW

SEQ ID NO: 63268 - protein, 18 aa, Homo sapiens
CARGSVIYYDSSGYFDYW

SEQ ID NO: 63269 - protein, 13 aa, Homo sapiens
CAKALTTGGFDYW

SEQ ID NO: 63270 - protein, 17 aa, Homo sapiens
CARDGDISLIGEAMDVW

SEQ ID NO: 63271 - protein, 19 aa, Homo sapiens
CARVPDYYASASYSHFDYW

SEQ ID NO: 63272 - protein, 18 aa, Homo sapiens
CARRQAIFGVVTRAFDIW

SEQ ID NO: 63273 - protein, 19 aa, Homo sapiens
CTRDRSGWEGFDYYYMDVW

SEQ ID NO: 63274 - protein, 16 aa, Homo sapiens
CARRSCSGESCRFDYW

SEQ ID NO: 63275 - protein, 20 aa, Homo sapiens
CARGVFGVTNLYYYYYMDVW

SEQ ID NO: 63276 - protein, 20 aa, Homo sapiens
CARHMGDHSIAYYYYGMDVW

SEQ ID NO: 63277 - protein, 24 aa, Homo sapiens
CARDTKEYSSGRQPYYYYYGMDVW

SEQ ID NO: 63278 - protein, 13 aa, Homo sapiens
CQVWDSITDHWLF

SEQ ID NO: 63279 - protein, 34 aa, Homo sapiens
CTAYLELNRLTSEDTAIYYCARGMTGVAGAFDIW

SEQ ID NO: 63280 - protein, 21 aa, Homo sapiens
CARDSWIAAPAVLYYYGMDVW

SEQ ID NO: 63281 - protein, 20 aa, Homo sapiens
CVKDSNWGVALLFLYAFDIW

SEQ ID NO: 63282 - protein, 20 aa, Homo sapiens
CARASGYDFWSGYNDAFDIW

SEQ ID NO: 63283 - protein, 14 aa, Homo sapiens
CAAWDVSPSGPVVF

SEQ ID NO: 63284 - protein, 16 aa, Homo sapiens
CAKGKDGQGDTGNDYW

SEQ ID NO: 63285 - protein, 17 aa, Homo sapiens
CARDHDYGGNMFAFDIW

SEQ ID NO: 63286 - protein, 13 aa, Homo sapiens
CARDRGGTYYDYW

SEQ ID NO: 63287 - protein, 23 aa, Homo sapiens
CARDKPRRPVGIAVAGTNAFDIW

SEQ ID NO: 63288 - protein, 21 aa, Homo sapiens
CARDQNRVRLGEPTEDALDIW

SEQ ID NO: 63289 - protein, 17 aa, Homo sapiens
CARVPLDNTWYVWFDIW

SEQ ID NO: 63290 - protein, 19 aa, Homo sapiens
CARHGSSGWYEILNWFDPW

SEQ ID NO: 63291 - protein, 17 aa, Homo sapiens
CTRSTIGGRAHDAFDMW

SEQ ID NO: 63292 - protein, 21 aa, Homo sapiens
CAREGYSYGYWTYYYYGMDVW

SEQ ID NO: 63293 - protein, 29 aa, Homo sapiens
CARDLVPGRTAFGVAFTSPGFYYYGMDVW

SEQ ID NO: 63294 - protein, 17 aa, Homo sapiens
CATFGGIAEAGTRPDYW

SEQ ID NO: 63295 - protein, 23 aa, Homo sapiens
CARGSGTMFYQLHYYYYYGMDVW

SEQ ID NO: 63296 - protein, 23 aa, Homo sapiens
CARAYCGGDCSYWGESLVGFDYW

SEQ ID NO: 63297 - protein, 22 aa, Homo sapiens
CAKRAGSYCSSTSCYVSYFDYW

SEQ ID NO: 63298 - protein, 15 aa, Homo sapiens
CAGVIPAARDAFDFW

SEQ ID NO: 63299 - protein, 15 aa, Homo sapiens
CARDQYDSSGYIDYW

SEQ ID NO: 63300 - protein, 22 aa, Homo sapiens
CARGRDSSWYSYYYHYYGMDVW

SEQ ID NO: 63301 - protein, 16 aa, Homo sapiens
CARSPGGVMGGSIDYW

SEQ ID NO: 63302 - protein, 14 aa, Homo sapiens
CWYYDTRDYYWNYW

SEQ ID NO: 63303 - protein, 21 aa, Homo sapiens
CARNYLFGELPYYYYYGMDVW

SEQ ID NO: 63304 - protein, 25 aa, Homo sapiens
CAKAPFYYYDSSGYYGAAEYYFDYW

SEQ ID NO: 63305 - protein, 24 aa, Homo sapiens
CAREGIVVVPAVTEHHYYYYMDVW

SEQ ID NO: 63306 - protein, 23 aa, Homo sapiens
CARAGVGVTAKWGLYYYYGMDVW

SEQ ID NO: 63307 - protein, 18 aa, Homo sapiens
CGRAGWGYGSGATTGDYW

SEQ ID NO: 63308 - protein, 19 aa, Homo sapiens
CARDGRGSSSWYAGWFDPW

SEQ ID NO: 63309 - protein, 22 aa, Homo sapiens
CARARDGSSGWLKEYYYYMDVW

SEQ ID NO: 63310 - protein, 23 aa, Homo sapiens
CARDWCLYSSNPNYYYYYGMDVW

SEQ ID NO: 63311 - protein, 18 aa, Homo sapiens
CARDYYDSSTYRPHFDYW

SEQ ID NO: 63312 - protein, 21 aa, Homo sapiens
CASDTGFSSGWYTRTYYFDYW

SEQ ID NO: 63313 - protein, 18 aa, Homo sapiens
CAKSGYSYGYRDNYFDYW

SEQ ID NO: 63314 - protein, 19 aa, Homo sapiens
CAKLAVGRRSQPPYYFDYW

SEQ ID NO: 63315 - protein, 12 aa, Homo sapiens
CVKGDDSPGDYW

SEQ ID NO: 63316 - protein, 25 aa, Homo sapiens
CARERYYYDSSGYYSGYYYYGMDVW

SEQ ID NO: 63317 - protein, 10 aa, Homo sapiens [sequence omitted]

SEQ ID NO: 63318 - protein, 25 aa, Homo sapiens
CARVFWGRPSIGQLADYYYYGMDVW

SEQ ID NO: 63319 - protein, 18 aa, Homo sapiens
CAKDLGQFYYYYYGMDVW

SEQ ID NO: 63320 - protein, 16 aa, Homo sapiens
CAREDFDDNDPPFDYW

SEQ ID NO: 63321 - protein, 21 aa, Homo sapiens
CAKDLSYCSGGSCYGDSFDYW

SEQ ID NO: 63322 - protein, 20 aa, Homo sapiens
CARANPALLSGYYYYYMDVW

SEQ ID NO: 63323 - protein, 19 aa, Homo sapiens
CAKVWGLFGSGGDDAFDIW

SEQ ID NO: 63324 - protein, 15 aa, Homo sapiens
CARSLAVAGEPFDYW

SEQ ID NO: 63325 - protein, 18 aa, Homo sapiens
CAKDYYSSSWYREYFQHW

SEQ ID NO: 63326 - protein, 17 aa, Homo sapiens
CARPRGYTYGHDGFDVW

SEQ ID NO: 63327 - protein, 16 aa, Homo sapiens
CARLIVFPAAMWIDYW

SEQ ID NO: 63328 - protein, 12 aa, Homo sapiens
CQQYGTSTTYNF

SEQ ID NO: 63329 - protein, 16 aa, Homo sapiens
CAKGGGRYYSDYFDHW

SEQ ID NO: 63330 - protein, 15 aa, Homo sapiens
CARDVWVSLSYFDTW

SEQ ID NO: 63331 - protein, 13 aa, Homo sapiens
CARVNTWNYFDSW

SEQ ID NO: 63332 - protein, 23 aa, Homo sapiens
CAKDGASWWLLREYYYYYGMDVW

SEQ ID NO: 63333 - protein, 17 aa, Homo sapiens
CAKVDADTGLITFFDNW

SEQ ID NO: 63334 - protein, 14 aa, Homo sapiens
CASSRTGGGSFDIW

SEQ ID NO: 63335 - protein, 15 aa, Homo sapiens
CARDDYGDYAYFDYW

SEQ ID NO: 63336 - protein, 17 aa, Homo sapiens
CARDWSGYDPTYYFDSW

SEQ ID NO: 63337 - protein, 20 aa, Homo sapiens
CAKAGYSYGLSEGKPWFDYW

SEQ ID NO: 63338 - protein, 16 aa, Homo sapiens
CARDLRAATLSPFDPW

SEQ ID NO: 63339 - protein, 16 aa, Homo sapiens
CARGDTSGTFHYFDNW

SEQ ID NO: 63340 - protein, 18 aa, Homo sapiens
CARHLGGNYIYYHGMDVW

SEQ ID NO: 63341 - protein, 21 aa, Homo sapiens
CARVRRDYYDSSGYRYYFDYW

SEQ ID NO: 63342 - protein, 20 aa, Homo sapiens
CARDSTDIVIVPGAETLDYW

SEQ ID NO: 63343 - protein, 14 aa, Homo sapiens
CCSRDTSGNHHYVF

SEQ ID NO: 63344 - protein, 17 aa, Homo sapiens
CTKVSISSSGRYFFDFW

SEQ ID NO: 63345 - protein, 25 aa, Homo sapiens
CARVSTHYDSSGYYNDDWLDYFDYW

SEQ ID NO: 63346 - protein, 18 aa, Homo sapiens
CAREFMITFGSSYAFDIW

SEQ ID NO: 63347 - protein, 19 aa, Homo sapiens
CAHSRHYDFWSGYSYFDYW

SEQ ID NO: 63348 - protein, 13 aa, Homo sapiens
CARLRGTPTFDYW

SEQ ID NO: 63349 - protein, 21 aa, Homo sapiens
CARNRGGVGTKDYYYYYMDVW

SEQ ID NO: 63350 - protein, 17 aa, Homo sapiens
CARDTTDSDTTSYIDYW

SEQ ID NO: 63351 - protein, 18 aa, Homo sapiens
CARELRFSEWRGNWFDPW

SEQ ID NO: 63352 - protein, 14 aa, Homo sapiens
CARQDTAIYPLDYW

SEQ ID NO: 63353 - protein, 14 aa, Homo sapiens
CAGQWLVFEPPDYW

SEQ ID NO: 63354 - protein, 19 aa, Homo sapiens
CARWPITMLTVVTDAFDIW

SEQ ID NO: 63355 - protein, 14 aa, Homo sapiens
CARDLGYYSIFDLW

SEQ ID NO: 63356 - protein, 21 aa, Homo sapiens
CARAPVEYLSGWYTGYYFDYW

SEQ ID NO: 63357 - protein, 14 aa, Homo sapiens
CARNHRTNGWFDPW

SEQ ID NO: 63358 - protein, 20 aa, Homo sapiens
CARDQTSKWELSGRYAFDFW

SEQ ID NO: 63359 - protein, 21 aa, Homo sapiens
CARDLTAVASYYYYYYGMDVW

SEQ ID NO: 63360 - protein, 15 aa, Homo sapiens
CAKERYRYYKWFDPW

SEQ ID NO: 63361 - protein, 16 aa, Homo sapiens
CARHPTNALADAFDIW

SEQ ID NO: 63362 - protein, 21 aa, Homo sapiens
CANPLYDILTGYYNLYAFDIW

SEQ ID NO: 63363 - protein, 16 aa, Homo sapiens
CAKLAGDNYYYGMDVW

SEQ ID NO: 63364 - protein, 23 aa, Homo sapiens
CAKAPPLLCTRGVCSNEFFFDYW

SEQ ID NO: 63365 - protein, 23 aa, Homo sapiens
CTTEGGECSSTSCYVGEYYFDYW

SEQ ID NO: 63366 - protein, 17 aa, Homo sapiens
CAKADLGYSYGFSVDYW

SEQ ID NO: 63367 - protein, 14 aa, Homo sapiens
CARSAALKPDFDYW

SEQ ID NO: 63368 - protein, 18 aa, Homo sapiens
CARVIAAAGTPYNWFDPW

SEQ ID NO: 63369 - protein, 16 aa, Homo sapiens
CARDPQATPVYYFDYW

SEQ ID NO: 63370 - protein, 14 aa, Homo sapiens
CARGNFGDFYFNKW

SEQ ID NO: 63371 - protein, 12 aa, Homo sapiens
CQQSYTTFAWTF

SEQ ID NO: 63372 - protein, 19 aa, Homo sapiens
CARDLFSSGRYKDQAFDMW

SEQ ID NO: 63373 - protein, 13 aa, Homo sapiens
CAKDRGWNAMDVW

SEQ ID NO: 63374 - protein, 17 aa, Homo sapiens
CARVGDPFFYFYAMDVW

SEQ ID NO: 63375 - protein, 16 aa, Homo sapiens
CSRAGLAVTGGTLDYW

SEQ ID NO: 63376 - protein, 18 aa, Homo sapiens
CAREHPGVWFGGNWFDPW

SEQ ID NO: 63377 - protein, 19 aa, Homo sapiens
CARASDIVSTPDGNYFDSW

SEQ ID NO: 63378 - protein, 13 aa, Homo sapiens
CARDRDYVYFQHW

SEQ ID NO: 63379 - protein, 20 aa, Homo sapiens
CARQQPSLWFGELSPWFDSW

SEQ ID NO: 63380 - protein, 13 aa, Homo sapiens
CASAREYVNLDYW

SEQ ID NO: 63381 - protein, 16 aa, Homo sapiens
CAKDGGNDYGDQLDYW

SEQ ID NO: 63382 - protein, 18 aa, Homo sapiens
CARFIPEAATGTGWFDPW

SEQ ID NO: 63383 - protein, 15 aa, Homo sapiens
CQQSYSTPGKKRYTF

SEQ ID NO: 63384 - protein, 15 aa, Homo sapiens
CVRESIDFWRAFDYW

SEQ ID NO: 63385 - protein, 20 aa, Homo sapiens
CVREPGYCRDRICYSWFDPW

SEQ ID NO: 63386 - protein, 12 aa, Homo sapiens
CNSRDSYSNHEF

SEQ ID NO: 63387 - protein, 16 aa, Homo sapiens
CARDWLVGEFPWFDPW

SEQ ID NO: 63388 - protein, 19 aa, Homo sapiens
CASAQVGATKYYYYGMDVW

SEQ ID NO: 63389 - protein, 23 aa, Homo sapiens
CARVYYDFWSGYYRGSSNPLDYW

SEQ ID NO: 63390 - protein, 15 aa, Homo sapiens
CARISSNEGWFFDLW

SEQ ID NO: 63391 - protein, 15 aa, Homo sapiens
CARESDRSSWYGDYW

SEQ ID NO: 63392 - protein, 13 aa, Homo sapiens
CTSHLDFRPFEYW

SEQ ID NO: 63393 - protein, 15 aa, Homo sapiens
CVRGKGSGSLVIDYW

SEQ ID NO: 63394 - protein, 20 aa, Homo sapiens
CARQYNWNYSSGWYSYFDYW

SEQ ID NO: 63395 - protein, 13 aa, Homo sapiens
CELIVVDDLGDYW

SEQ ID NO: 63396 - protein, 15 aa, Homo sapiens
CARGPYSKGNWFDPW

SEQ ID NO: 63397 - protein, 11 aa, Homo sapiens
CLKYNNAPLIF

SEQ ID NO: 63398 - protein, 18 aa, Homo sapiens
CARDTGLGVHYYYGMDVW

SEQ ID NO: 63399 - protein, 25 aa, Homo sapiens
CARHGGQRVLRFVDWILYEAKFDPW

SEQ ID NO: 63400 - protein, 17 aa, Homo sapiens
CARRSVGWATESPFDIW

SEQ ID NO: 63401 - protein, 19 aa, Homo sapiens
CARSGYSNYAYYYYGMDVW

SEQ ID NO: 63402 - protein, 18 aa, Homo sapiens
CARDMEMATIRSYYFDYW

SEQ ID NO: 63403 - protein, 21 aa, Homo sapiens
CARDGGYYYESSGFVGFFDSW

SEQ ID NO: 63404 - protein, 18 aa, Homo sapiens
CVTQVTVAGYLLEYFQHW

SEQ ID NO: 63405 - protein, 16 aa, Homo sapiens
CAKVSLAVAQGAFDIW

SEQ ID NO: 63406 - protein, 22 aa, Homo sapiens
CATQAATAYSFGSSSDNYFAPW

SEQ ID NO: 63407 - protein, 14 aa, Homo sapiens
CARVTSYFGSFDPW

SEQ ID NO: 63408 - protein, 18 aa, Homo sapiens
CARAPFSYTAMATNFDYW

SEQ ID NO: 63409 - protein, 19 aa, Homo sapiens
CAKDPRWGYYDSSGYPDYW

SEQ ID NO: 63410 - protein, 24 aa, Homo sapiens
CARWSSPCTSHCYPGEQSPAFDYW

SEQ ID NO: 63411 - protein, 24 aa, Homo sapiens
CARDTLEYSNTSGLYYYYYGMDVW

SEQ ID NO: 63412 - protein, 20 aa, Homo sapiens
CARDVIVEGYCSGGRCADYW

SEQ ID NO: 63413 - protein, 25 aa, Homo sapiens
CAREADVLLWFGELLLKGAYYFDYW

SEQ ID NO: 63414 - protein, 20 aa, Homo sapiens
CARRGDGYITGWNWGYFQSW

SEQ ID NO: 63415 - protein, 17 aa, Homo sapiens
CAHMRLVGVTPKAFDIW

SEQ ID NO: 63416 - protein, 22 aa, Homo sapiens
CARDKKIGSGSSWFRLGWFDPW

SEQ ID NO: 63417 - protein, 16 aa, Homo sapiens
CARWEYYYYYYGMDVW

SEQ ID NO: 63418 - protein, 13 aa, Homo sapiens [sequence omitted]

SEQ ID NO: 63419 - protein, 19 aa, Homo sapiens
CARGLPTGMVRGAGPIDYW

SEQ ID NO: 63420 - protein, 14 aa, Homo sapiens
CARTIAAATLTDYW

SEQ ID NO: 63421 - protein, 19 aa, Homo sapiens
CARSGYSSSWYYYYGMDVW

SEQ ID NO: 63422 - protein, 14 aa, Homo sapiens
CARDGEGDSHFDYW

SEQ ID NO: 63423 - protein, 18 aa, Homo sapiens
CARDYRELELRTDWFDPW

SEQ ID NO: 63424 - protein, 22 aa, Homo sapiens
CARAHWVRGVISFYYYYGMDVW

SEQ ID NO: 63425 - protein, 17 aa, Homo sapiens
CAKDRDSSGWHHAFDIW

SEQ ID NO: 63426 - protein, 17 aa, Homo sapiens
CVRDLQYAWAGYSGDYW

SEQ ID NO: 63427 - protein, 18 aa, Homo sapiens
CAHRLAVSGTGSSAFDVW

SEQ ID NO: 63428 - protein, 13 aa, Homo sapiens [sequence omitted]

SEQ ID NO: 63429 - protein, 14 aa, Homo sapiens
CARCSSTSCHLDYW

SEQ ID NO: 63430 - protein, 18 aa, Homo sapiens
CAKASAGPAARSDAFDSW

SEQ ID NO: 63431 - protein, 18 aa, Homo sapiens
CAKDLSGYYDSSGSFDYW

SEQ ID NO: 63432 - protein, 17 aa, Homo sapiens
CARDRPHAGSGSYPDYW

SEQ ID NO: 63433 - protein, 20 aa, Homo sapiens
CARDYSSGWYGCCSVWFDPW

SEQ ID NO: 63434 - protein, 22 aa, Homo sapiens
CATSAYFQGYDFWSGSVGFDIW

SEQ ID NO: 63435 - protein, 18 aa, Homo sapiens
CARDRREYGSGSYRLDYW

SEQ ID NO: 63436 - protein, 19 aa, Homo sapiens
CARHHPPGGYSSGHYFDNW

SEQ ID NO: 63437 - protein, 19 aa, Homo sapiens
CARDRQNTISGVVNWFDAW

SEQ ID NO: 63438 - protein, 23 aa, Homo sapiens
CAKDRAYCSGGSCYYYYYYMDVW

SEQ ID NO: 63439 - protein, 17 aa, Homo sapiens
CARVQRQQLVFDAFDIW

SEQ ID NO: 63440 - protein, 19 aa, Homo sapiens
CARDGKVPGDHYYYAMDVW

SEQ ID NO: 63441 - protein, 23 aa, Homo sapiens
CARLQTFVSSFHKYYYYYYMDVW

SEQ ID NO: 63442 - protein, 22 aa, Homo sapiens
CVHSPPPFGYDLLTGYFYFDYW

SEQ ID NO: 63443 - protein, 22 aa, Homo sapiens
CARDATMVRGVIYYYYYGMDVW

SEQ ID NO: 63444 - protein, 24 aa, Homo sapiens
CAKSYYFIDFVSNSQSDGGVVDYW

SEQ ID NO: 63445 - protein, 18 aa, Homo sapiens
CAKELGQFYYYYYGMYVW

SEQ ID NO: 63446 - protein, 22 aa, Homo sapiens
CAREGSSFEDFQDRDNHYFDYW

SEQ ID NO: 63447 - protein, 14 aa, Homo sapiens
CARRAISEAVFDYW

SEQ ID NO: 63448 - protein, 23 aa, Homo sapiens
CAKARGTSTSSSQFYYFYAMDVW

SEQ ID NO: 63449 - protein, 18 aa, Homo sapiens
CASLLVDYNLAPWTFDHW

SEQ ID NO: 63450 - protein, 13 aa, Homo sapiens
CASSTGRYRLDYW

SEQ ID NO: 63451 - protein, 18 aa, Homo sapiens
CARGAHLDWLVVYYFDYW

SEQ ID NO: 63452 - protein, 19 aa, Homo sapiens
CAKGVTERSYYKNYYMDVW

SEQ ID NO: 63453 - protein, 14 aa, Homo sapiens
CAKAGGVSLGFDYW

SEQ ID NO: 63454 - protein, 15 aa, Homo sapiens
CARGVNWNYLQIDYW

SEQ ID NO: 63455 - protein, 17 aa, Homo sapiens
CARDQGGSFEPGAFDYW

SEQ ID NO: 63456 - protein, 16 aa, Homo sapiens
CAKDIGDEGGNAFDIW

SEQ ID NO: 63457 - protein, 15 aa, Homo sapiens
CASHMTSVTSAFDYW

SEQ ID NO: 63458 - protein, 14 aa, Homo sapiens
CARDHTALPAFDIW

SEQ ID NO: 63459 - protein, 16 aa, Homo sapiens
CAREDTAMVYHSLDYW

SEQ ID NO: 63460 - protein, 14 aa, Homo sapiens
CATFPVGATGWDYW

SEQ ID NO: 63461 - protein, 15 aa, Homo sapiens
CARTLSGGSCYFDYW

SEQ ID NO: 63462 - protein, 15 aa, Homo sapiens
CARGTWFGELFFDFW

SEQ ID NO: 63463 - protein, 14 aa, Homo sapiens
CAKVSLRSSSFDYW

SEQ ID NO: 63464 - protein, 19 aa, Homo sapiens [sequence omitted]

SEQ ID NO: 63465 - protein, 20 aa, Homo sapiens
CARDVTEFHGPMSTRHFDFW

SEQ ID NO: 63466 - protein, 24 aa, Homo sapiens
CARASSLGDYGDLRVYYYYYMDVW

SEQ ID NO: 63467 - protein, 14 aa, Homo sapiens
CARRGSPNRYFDYW

SEQ ID NO: 63468 - protein, 20 aa, Homo sapiens
CAKSSEYDFWSGYSVYFDYW

SEQ ID NO: 63469 - protein, 15 aa, Homo sapiens
CASHDFVYGWAFNYW

SEQ ID NO: 63470 - protein, 18 aa, Homo sapiens
CARGLDYDFWSGSGFDYW

SEQ ID NO: 63471 - protein, 12 aa, Homo sapiens
CARLSFGEFSYW

SEQ ID NO: 63472 - protein, 15 aa, Homo sapiens
CARVLGDSGDHFDYW

SEQ ID NO: 63473 - protein, 13 aa, Homo sapiens
CQQYDSWPPGKMF

SEQ ID NO: 63474 - protein, 17 aa, Homo sapiens
CATGPLNWNYAYYFDYW

SEQ ID NO: 63475 - protein, 31 aa, Homo sapiens
CALPISAVYYCARISLGYCSSTSCYSGFDPW

SEQ ID NO: 63476 - protein, 15 aa, Homo sapiens
CARQTRSSWPDFDYW

SEQ ID NO: 63477 - protein, 14 aa, Homo sapiens
CARDSLGPLQIDYW

SEQ ID NO: 63478 - protein, 25 aa, Homo sapiens
CAHRHLKYYYDSGYTMTPETAFDIW

SEQ ID NO: 63479 - protein, 14 aa, Homo sapiens
CAAMMTAHYSIDYW

SEQ ID NO: 63480 - protein, 18 aa, Homo sapiens
CARDNEAYCGGDCSLDYW

SEQ ID NO: 63481 - protein, 14 aa, Homo sapiens
CVKDPGLGGDFDIW

SEQ ID NO: 63482 - protein, 20 aa, Homo sapiens
CARILYVWGSYRLGAPIDYW

SEQ ID NO: 63483 - protein, 27 aa, Homo sapiens
CACATDLTVTNYYNASGFYPRGYFDSW

SEQ ID NO: 63484 - protein, 18 aa, Homo sapiens
CARGPTTVTTLYGAFDIW

SEQ ID NO: 63485 - protein, 17 aa, Homo sapiens
CASIGACSSTSCFFDYW

SEQ ID NO: 63486 - protein, 20 aa, Homo sapiens
CARDEWELLDSSLWSGRDYW

SEQ ID NO: 63487 - protein, 13 aa, Homo sapiens
CARDENMRAFDFW

SEQ ID NO: 63488 - protein, 15 aa, Homo sapiens
CAKDLRGSYSTPDYW

SEQ ID NO: 63489 - protein, 14 aa, Homo sapiens
CATFHPSADAFDIW

SEQ ID NO: 63490 - protein, 21 aa, Homo sapiens
CAREKGVDIVATITSSAFDIW

SEQ ID NO: 63491 - protein, 18 aa, Homo sapiens
CSKHSVGTSSSYDAFDVW

SEQ ID NO: 63492 - protein, 24 aa, Homo sapiens
CAREPGSVGSLEWSYPPAPYFDYW

SEQ ID NO: 63493 - protein, 21 aa, Homo sapiens
CAKTDTVVIVNAFRFWYYDLW

SEQ ID NO: 63494 - protein, 24 aa, Homo sapiens
CARRNLHYDILTGYYGSHEYFDYW

SEQ ID NO: 63495 - protein, 24 aa, Homo sapiens
CARERVDITMIVVVPQYYYGMDVW

SEQ ID NO: 63496 - protein, 19 aa, Homo sapiens
CARDRDGGFWGSSHWFDPW

SEQ ID NO: 63497 - protein, 25 aa, Homo sapiens
CARVSTYYDFWSGYSVPRSYYFDYW

SEQ ID NO: 63498 - protein, 20 aa, Homo sapiens
CARGPRATVSHYYYYGMDVW

SEQ ID NO: 63499 - protein, 11 aa, Homo sapiens
CMQTLQVPHMF

SEQ ID NO: 63500 - protein, 25 aa, Homo sapiens
CARVVERYCSSTSCYTDYYYYMDVW

SEQ ID NO: 63501 - protein, 18 aa, Homo sapiens
CATTRGSGYYYLWAFDIW

SEQ ID NO: 63502 - protein, 20 aa, Homo sapiens
CARDRPLVVPAAIPIPNDYW

SEQ ID NO: 63503 - protein, 19 aa, Homo sapiens
CAKQSAVVVILSGGAFDIW

SEQ ID NO: 63504 - protein, 22 aa, Homo sapiens
CARDSGGVWEQPGDRIYYFDYW

SEQ ID NO: 63505 - protein, 13 aa, Homo sapiens
CSRGSGSNALDYW

SEQ ID NO: 63506 - protein, 18 aa, Homo sapiens
CAREGGRVTGYYYGMDVW

SEQ ID NO: 63507 - protein, 27 aa, Homo sapiens
CARQNLIITIFGVALSQPHSSSWFDPW

SEQ ID NO: 63508 - protein, 17 aa, Homo sapiens
CARDFCSSTSCYLFDYW

SEQ ID NO: 63509 - protein, 18 aa, Homo sapiens
CARVGWGDSSGYYLPDYW

SEQ ID NO: 63510 - protein, 16 aa, Homo sapiens
CARWGGRYSGVNFDYW

SEQ ID NO: 63511 - protein, 17 aa, Homo sapiens
CARNTYQYGDPGYFDYW

SEQ ID NO: 63512 - protein, 21 aa, Homo sapiens
CLRGAYEYCGGDCSSDLFDYW

SEQ ID NO: 63513 - protein, 19 aa, Homo sapiens
CAKDHGIDYDYYYYYMDVW

SEQ ID NO: 63514 - protein, 20 aa, Homo sapiens
CARRAGGGYGGNSGWYFDLW

SEQ ID NO: 63515 - protein, 15 aa, Homo sapiens
CAKMASGYEDTADYW

SEQ ID NO: 63516 - protein, 21 aa, Homo sapiens
CARAGWLRSGGVIVLNWFDPW

SEQ ID NO: 63517 - protein, 18 aa, Homo sapiens
CARTLVPTAINEVTFDYW

SEQ ID NO: 63518 - protein, 16 aa, Homo sapiens
CTRDRGGYYGGANDYW

SEQ ID NO: 63519 - protein, 18 aa, Homo sapiens
CAAVPTHYSSKSPYYDYW

SEQ ID NO: 63520 - protein, 17 aa, Homo sapiens
CARDRVEAGRLDTFHIW

SEQ ID NO: 63521 - protein, 22 aa, Homo sapiens
CARAGPKVTTVFNYFFYSFDVW

SEQ ID NO: 63522 - protein, 18 aa, Homo sapiens
CVKGPKGTFFWIYFFDYW

SEQ ID NO: 63523 - protein, 17 aa, Homo sapiens
CARHSGTDSSGWPFDPW

SEQ ID NO: 63524 - protein, 16 aa, Homo sapiens
CARHHEGVVTDAFDIW

SEQ ID NO: 63525 - protein, 19 aa, Homo sapiens
CAKDLLWFGESVPYYFDYW

SEQ ID NO: 63526 - protein, 22 aa, Homo sapiens
CARRAAAVLRFLEWRHNWFDPW

SEQ ID NO: 63527 - protein, 15 aa, Homo sapiens
CGLGGGRGYSYGDYW

SEQ ID NO: 63528 - protein, 15 aa, Homo sapiens
CGTWDSSLIPGPYVF

SEQ ID NO: 63529 - protein, 17 aa, Homo sapiens
CARDLKPPSGYTYFDYW

SEQ ID NO: 63530 - protein, 19 aa, Homo sapiens
CAKDRSLVDMATVDAFDVW

SEQ ID NO: 63531 - protein, 24 aa, Homo sapiens
CARAVVDMIVVVIIPYYYYYMDVW

SEQ ID NO: 63532 - protein, 19 aa, Homo sapiens
CARDLTAYYDTIRGLLDYW

SEQ ID NO: 63533 - protein, 18 aa, Homo sapiens
CVRGISREFYYYHGMDVW

SEQ ID NO: 63534 - protein, 17 aa, Homo sapiens
CARGDSSGYRYWYFDLW

SEQ ID NO: 63535 - protein, 16 aa, Homo sapiens
CARYSYLPSNDAFDIW

SEQ ID NO: 63536 - protein, 17 aa, Homo sapiens
CARHEGGGVQPWYFDLW

SEQ ID NO: 63537 - protein, 24 aa, Homo sapiens
CARGPGSRTIFGVVIVQEVAFDIW

SEQ ID NO: 63538 - protein, 18 aa, Homo sapiens
CTTASGSITSGWANFDYW

SEQ ID NO: 63539 - protein, 19 aa, Homo sapiens
CARISNADQHLDPFYFDFW

SEQ ID NO: 63540 - protein, 25 aa, Homo sapiens
CARATYYYDSSGYRAWDLFYYFDYW

SEQ ID NO: 63541 - protein, 13 aa, Homo sapiens
CAKKGYQAAFDIW

SEQ ID NO: 63542 - protein, 19 aa, Homo sapiens
CTTGGNSPRRYYYYGMDVW

SEQ ID NO: 63543 - protein, 14 aa, Homo sapiens
CARGGRSSSWLDYW

SEQ ID NO: 63544 - protein, 17 aa, Homo sapiens
CARDRLVVTIETPFYYW

SEQ ID NO: 63545 - protein, 16 aa, Homo sapiens
CAKDVGGWLQDFRDYW

SEQ ID NO: 63546 - protein, 13 aa, Homo sapiens
CATGQQFGGFDVW

SEQ ID NO: 63547 - protein, 18 aa, Homo sapiens
CAREPGAGWLQFGDFDLW

SEQ ID NO: 63548 - protein, 27 aa, Homo sapiens
CARDHCSSTSCYTWGWDYYYYYYMDVW

SEQ ID NO: 63549 - protein, 19 aa, Homo sapiens
CARIHLWTDYYYYYYMDVW

SEQ ID NO: 63550 - protein, 24 aa, Homo sapiens
CARASPDYGDLVAYYYYYYGMDVW

SEQ ID NO: 63551 - protein, 21 aa, Homo sapiens
CARLDRVGIAVIRPSFYFDYW

SEQ ID NO: 63552 - protein, 21 aa, Homo sapiens
CARGAHSSSWPYYYYYYMDVW

SEQ ID NO: 63553 - protein, 17 aa, Homo sapiens
CTKEVYSGYDFWGFDHW

SEQ ID NO: 63554 - protein, 21 aa, Homo sapiens
CARDSLESGSKFLGSPWFDPW

SEQ ID NO: 63555 - protein, 23 aa, Homo sapiens
CARDGWGGSGSYYSYYYYYMDVW

SEQ ID NO: 63556 - protein, 16 aa, Homo sapiens
CAREYGSGRTYYFDYW

SEQ ID NO: 63557 - protein, 17 aa, Homo sapiens
CVRAAFIGSGGDAFDIW

SEQ ID NO: 63558 - protein, 15 aa, Homo sapiens
CAKDRLPLGESMDYW

SEQ ID NO: 63559 - protein, 19 aa, Homo sapiens
CARDRGQWLAYYYYAMDVW

SEQ ID NO: 63560 - protein, 23 aa, Homo sapiens
CARDDGRVTTSLSYYYYYGMDVW

SEQ ID NO: 63561 - protein, 19 aa, Homo sapiens
CARDPGYKWNDVWGFLDYW

SEQ ID NO: 63562 - protein, 18 aa, Homo sapiens
CARAEIIAMSTSDSFDIW

SEQ ID NO: 63563 - protein, 12 aa, Homo sapiens
CAGRQRWTFDSW

SEQ ID NO: 63564 - protein, 21 aa, Homo sapiens
CAKDTGGREVMIMREEYFQHW

SEQ ID NO: 63565 - protein, 16 aa, Homo sapiens
CTTEYYGGFFLGFDYW

SEQ ID NO: 63566 - protein, 22 aa, Homo sapiens
CARDRRPRVGGWTLDSYFLDYW

SEQ ID NO: 63567 - protein, 15 aa, Homo sapiens
CATAEDYYDSSGDYW

SEQ ID NO: 63568 - protein, 25 aa, Homo sapiens
CAGGERDDFGSGYYGAYYYYGMDVW

SEQ ID NO: 63569 - protein, 20 aa, Homo sapiens
CARLKEEQHQVLLLGPFDMW

SEQ ID NO: 63570 - protein, 21 aa, Homo sapiens
CARMAGESRGYGYFYYGMDVW

SEQ ID NO: 63571 - protein, 20 aa, Homo sapiens
CARLGQGRVHPYYYYGMDVW

SEQ ID NO: 63572 - protein, 19 aa, Homo sapiens
CVRVSCKGVSCYPGPFDYW

SEQ ID NO: 63573 - protein, 18 aa, Homo sapiens
CAKNPQLYSSSWYYFDYW

SEQ ID NO: 63574 - protein, 17 aa, Homo sapiens
CARGTSSWISYNYFDYW

SEQ ID NO: 63575 - protein, 19 aa, Homo sapiens
CARIAVAALSYYYYGMDVW

SEQ ID NO: 63576 - protein, 17 aa, Homo sapiens
CARIPGYSGSWRYFDNW

SEQ ID NO: 63577 - protein, 22 aa, Homo sapiens
CARGGFCSSSSCSTEIYYFDYW

SEQ ID NO: 63578 - protein, 18 aa, Homo sapiens
CARGNLVGRSMKYAMDVW

SEQ ID NO: 63579 - protein, 16 aa, Homo sapiens
CAKDVHAVAAARIDYW

SEQ ID NO: 63580 - protein, 22 aa, Homo sapiens
CADSSGNQQVGLPVRGVWFDPW

SEQ ID NO: 63581 - protein, 8 aa, Homo sapiens
CAQYFNHW

SEQ ID NO: 63582 - protein, 26 aa, Homo sapiens
CARGGWGYCSSTSCSSPHYYWYFDLW

SEQ ID NO: 63583 - protein, 17 aa, Homo sapiens
CARCLSGSPRRDAFDIW

SEQ ID NO: 63584 - protein, 13 aa, Homo sapiens
CATAEIFGVVDYW

SEQ ID NO: 63585 - protein, 18 aa, Homo sapiens
CVKAGVIVVVITWEFDYW

SEQ ID NO: 63586 - protein, 17 aa, Homo sapiens
CARFLTISMAGDYFDYW

SEQ ID NO: 63587 - protein, 14 aa, Homo sapiens
CAGREEWLVRLDYW

SEQ ID NO: 63588 - protein, 17 aa, Homo sapiens
CAHSMRYSSTWYYFDYW

SEQ ID NO: 63589 - protein, 17 aa, Homo sapiens
CALPIFLIGADYYFDSW

SEQ ID NO: 63590 - protein, 18 aa, Homo sapiens
CATEAVIAAAGNDAFDIW

SEQ ID NO: 63591 - protein, 19 aa, Homo sapiens
CATVLGEPDYYYYYGMDVW

SEQ ID NO: 63592 - protein, 20 aa, Homo sapiens
CAREVSSNIFLGGNSYFDYW

SEQ ID NO: 63593 - protein, 24 aa, Homo sapiens
CARFYIDRHSYDSSGHYLKYYDHW

SEQ ID NO: 63594 - protein, 20 aa, Homo sapiens
CARVHYYGSGSYYKDAFDIW

SEQ ID NO: 63595 - protein, 18 aa, Homo sapiens
CASVRGSDNLQWDAFDIW

SEQ ID NO: 63596 - protein, 19 aa, Homo sapiens
CAREYSSGWSSIRWYFDLW

SEQ ID NO: 63597 - protein, 17 aa, Homo sapiens
CTRMPLIGYYYGNNDYW

SEQ ID NO: 63598 - protein, 17 aa, Homo sapiens
CARRLLVAVATTGFEYW

SEQ ID NO: 63599 - protein, 24 aa, Homo sapiens
CARSKVDPLRFLGGVEGEYYFDFW

SEQ ID NO: 63600 - protein, 15 aa, Homo sapiens
CARETDDLRISFDHW

SEQ ID NO: 63601 - protein, 22 aa, Homo sapiens
CARSRFLEWLSHLYYYYYMDVW

SEQ ID NO: 63602 - protein, 21 aa, Homo sapiens
CARNKKDYWFWSASEYFFDYW

SEQ ID NO: 63603 - protein, 24 aa, Homo sapiens
CAREDGGAAPKPPALRYYYGMDVW

SEQ ID NO: 63604 - protein, 14 aa, Homo sapiens
CARDSQLWLYIDYW

SEQ ID NO: 63605 - protein, 21 aa, Homo sapiens
CASGVVPAAIPGEYYYGMDVW

SEQ ID NO: 63606 - protein, 19 aa, Homo sapiens
CAKGSSAAPSHYYHYMDVW

SEQ ID NO: 63607 - protein, 25 aa, Homo sapiens
CARERSLDYYDSSGYPPSEYYFDYW

SEQ ID NO: 63608 - protein, 20 aa, Homo sapiens
CARHGWHCSSTRCYNYIDVW

SEQ ID NO: 63609 - protein, 15 aa, Homo sapiens
CARIDTGGYDFFDVW

SEQ ID NO: 63610 - protein, 17 aa, Homo sapiens
CAKVGYSIGWYPDFDYW

SEQ ID NO: 63611 - protein, 16 aa, Homo sapiens
CATAQDGYKSGNFDYW

SEQ ID NO: 63612 - protein, 22 aa, Homo sapiens
CARLEGFTIFGVVTSYNWFDPW

SEQ ID NO: 63613 - protein, 16 aa, Homo sapiens
CARDRDFGIQLCLDYW

SEQ ID NO: 63614 - protein, 19 aa, Homo sapiens
CAHRYYDSSGYWPWYFDSW

SEQ ID NO: 63615 - protein, 13 aa, Homo sapiens
CARIPPSLGSDYW

SEQ ID NO: 63616 - protein, 15 aa, Homo sapiens
CARGSGGPDNAFDIW

SEQ ID NO: 63617 - protein, 25 aa, Homo sapiens
CARDLGTYSYSNPGYNYYYYGLDVW

SEQ ID NO: 63618 - protein, 25 aa, Homo sapiens
CATSQKPKFTMVREPPWALDAFDIW

SEQ ID NO: 63619 - protein, 16 aa, Homo sapiens
CARLTHPAALYYFDSW

SEQ ID NO: 63620 - protein, 20 aa, Homo sapiens
CAHRRIEVGVRGPSNWFDPW

SEQ ID NO: 63621 - protein, 15 aa, Homo sapiens
CARDNSGYLVAFDIW

SEQ ID NO: 63622 - protein, 14 aa, Homo sapiens
CARLVSRRAGVDYW

SEQ ID NO: 63623 - protein, 17 aa, Homo sapiens [sequence omitted]

SEQ ID NO: 63624 - protein, 20 aa, Homo sapiens
CARDRGTTIFGAADDAFDIW

SEQ ID NO: 63625 - protein, 14 aa, Homo sapiens
CARSWSPGGAFDIW

SEQ ID NO: 63626 - protein, 22 aa, Homo sapiens
CARDSSRYCDNGVCYSGAFDFW

SEQ ID NO: 63627 - protein, 23 aa, Homo sapiens
CAGATRSNYYDSRGEYYRYFGLW

SEQ ID NO: 63628 - protein, 20 aa, Homo sapiens
CARITHYDSSGYYLPTFDYW

SEQ ID NO: 63629 - protein, 21 aa, Homo sapiens
CAKDFFRDGFIPRFYGAFNVW

SEQ ID NO: 63630 - protein, 19 aa, Homo sapiens
CARDKAAAVAGTKYYFDYW

SEQ ID NO: 63631 - protein, 18 aa, Homo sapiens
CARAIEYLDGTGNHFDYW

SEQ ID NO: 63632 - protein, 17 aa, Homo sapiens
CTRVLSWVTGLDYFDYW

SEQ ID NO: 63633 - protein, 20 aa, Homo sapiens
CASDRHYGGNYYYYYGMDVW

SEQ ID NO: 63634 - protein, 14 aa, Homo sapiens
CATDQTRGIGPDYW

SEQ ID NO: 63635 - protein, 22 aa, Homo sapiens
CARDKSGITMVRVSRPDPMDVW

SEQ ID NO: 63636 - protein, 14 aa, Homo sapiens
CVRGYNWNLLFDLW

SEQ ID NO: 63637 - protein, 17 aa, Homo sapiens
CARTYWGRSGQGGFDPW

SEQ ID NO: 63638 - protein, 18 aa, Homo sapiens
CARIGYYDILTGHLFDSW

SEQ ID NO: 63639 - protein, 23 aa, Homo sapiens
CARGFGRSYCSITTCYPNWFDPW

SEQ ID NO: 63640 - protein, 22 aa, Homo sapiens
CARDNPGRITIFGVVTNWFDPW

SEQ ID NO: 63641 - protein, 23 aa, Homo sapiens
CARRGRNYYDSSGYYNQAGDDYW

SEQ ID NO: 63642 - protein, 23 aa, Homo sapiens
CARAGTLYYYDSSGYYRDYFDYW

SEQ ID NO: 63643 - protein, 23 aa, Homo sapiens
CARDPTVTTDGDRGYYYYGMDVW

SEQ ID NO: 63644 - protein, 16 aa, Homo sapiens
CARQVPYGDSYYFDYW

SEQ ID NO: 63645 - protein, 20 aa, Homo sapiens
CASGYSSSWYLNYYYGMDVW

SEQ ID NO: 63646 - protein, 21 aa, Homo sapiens
CTRELDVTMIVVLREYYFDYW

SEQ ID NO: 63647 - protein, 19 aa, Homo sapiens
CARGITIFGALTYEYFQHW

SEQ ID NO: 63648 - protein, 23 aa, Homo sapiens
CARVALRVNRVLMARASDAFDIW

SEQ ID NO: 63649 - protein, 20 aa, Homo sapiens
CARDIEVPRAQSSGWTFDYW

SEQ ID NO: 63650 - protein, 19 aa, Homo sapiens
CARGRLMVSAIRVGYVDYW

SEQ ID NO: 63651 - protein, 17 aa, Homo sapiens
CARSRYSSSFFDGMDVW

SEQ ID NO: 63652 - protein, 15 aa, Homo sapiens
CATVGDYVKALFDYW

SEQ ID NO: 63653 - protein, 15 aa, Homo sapiens
CSGGNCYYYYGMDVW

SEQ ID NO: 63654 - protein, 26 aa, Homo sapiens
CARVRINSITIFGVVIIDSSGYLDYW

SEQ ID NO: 63655 - protein, 28 aa, Homo sapiens
CAKATVVSTNYDILTGYYAYYYYGMDVW

SEQ ID NO: 63656 - protein, 23 aa, Homo sapiens
CASADHSDFLTDYSEPLDAFAVW

SEQ ID NO: 63657 - protein, 19 aa, Homo sapiens
CAKDTHIVVVTAIPWFDPW

SEQ ID NO: 63658 - protein, 19 aa, Homo sapiens
CAYRRSLNGDWDTGAFDVW

SEQ ID NO: 63659 - protein, 23 aa, Homo sapiens
CAREVRGGYCSSTSCLYNWFDPW

SEQ ID NO: 63660 - protein, 11 aa, Homo sapiens
CVTGLYYFVYW

SEQ ID NO: 63661 - protein, 22 aa, Homo sapiens
CARDPPGPAGDDGSGYHAFDIW

SEQ ID NO: 63662 - protein, 13 aa, Homo sapiens
CARMYQPLYFDYW

SEQ ID NO: 63663 - protein, 23 aa, Homo sapiens
CARAKVQISLPYIDWLFHAFDMW

SEQ ID NO: 63664 - protein, 17 aa, Homo sapiens
CAKARRTIFHYYAMDIW

SEQ ID NO: 63665 - protein, 15 aa, Homo sapiens
CARSEAARLLAFDIW

SEQ ID NO: 63666 - protein, 18 aa, Homo sapiens
CAKSGYSYGYPVYYFDYW

SEQ ID NO: 63667 - protein, 17 aa, Homo sapiens
CAKEDGYDFWSGTFDYW

SEQ ID NO: 63668 - protein, 16 aa, Homo sapiens
CARVFESFRADYMDVW

SEQ ID NO: 63669 - protein, 19 aa, Homo sapiens
CARQATLGAASRYRWFDPW

SEQ ID NO: 63670 - protein, 13 aa, Homo sapiens
CARDFQLTPFDYW

SEQ ID NO: 63671 - protein, 17 aa, Homo sapiens
CARTITCGGDCYPFDYW

SEQ ID NO: 63672 - protein, 13 aa, Homo sapiens
CGSYSSSNTPRLF

SEQ ID NO: 63673 - protein, 23 aa, Homo sapiens
CARDSPPTVTTWDGRSYWYFDLW

SEQ ID NO: 63674 - protein, 23 aa, Homo sapiens
CARVREQWLANPHLYYYYGMDVW

SEQ ID NO: 63675 - protein, 18 aa, Homo sapiens
CARFYCSGNTCYKSFDYW

SEQ ID NO: 63676 - protein, 16 aa, Homo sapiens
CARGDNWIPRGAFDVW

SEQ ID NO: 63677 - protein, 25 aa, Homo sapiens
CARGGWKFGGVVVRQGYYYYYMDVW

SEQ ID NO: 63678 - protein, 17 aa, Homo sapiens
CARDSIGSGGTNAFDYW

SEQ ID NO: 63679 - protein, 22 aa, Homo sapiens
CARHCSGRANEVCYERDFLDYW

SEQ ID NO: 63680 - protein, 19 aa, Homo sapiens
CAKGVGATYYGFRGWFDPW

SEQ ID NO: 63681 - protein, 20 aa, Homo sapiens
CATIGHSSGYFRRNYYFDLW

SEQ ID NO: 63682 - protein, 26 aa, Homo sapiens
CATSHNEEVSDYDGVLSYYYYAIDVW

SEQ ID NO: 63683 - protein, 13 aa, Homo sapiens
CARVGILDASDIW

SEQ ID NO: 63684 - protein, 20 aa, Homo sapiens
CATDLEGVWFGELRGWFDPW

SEQ ID NO: 63685 - protein, 21 aa, Homo sapiens
CAKDMRAHYDILTGYQGLDYW

SEQ ID NO: 63686 - protein, 13 aa, Homo sapiens
CAIAQAERWFDPW

SEQ ID NO: 63687 - protein, 29 aa, Homo sapiens
CARDLPRDGMVRGVIITLRDYYYYGMDVW

SEQ ID NO: 63688 - protein, 16 aa, Homo sapiens
CAKEGEVTTVSGLDYW

SEQ ID NO: 63689 - protein, 19 aa, Homo sapiens
CARCPYGVQTTIFWYFDLW

SEQ ID NO: 63690 - protein, 19 aa, Homo sapiens
CAKTGITIFGVVIMFFDYW

SEQ ID NO: 63691 - protein, 19 aa, Homo sapiens
CARPRDEDIVVVVAALDYW

SEQ ID NO: 63692 - protein, 15 aa, Homo sapiens
CTRTRTSAGIHFDYW

SEQ ID NO: 63693 - protein, 26 aa, Homo sapiens
CARDRGAGGYCSSTSCYGYYYGMGVW

SEQ ID NO: 63694 - protein, 17 aa, Homo sapiens
CAKDWELPLGDDAFDIW

SEQ ID NO: 63695 - protein, 26 aa, Homo sapiens
CARDLHYYDSSGYYYLPYYYYGMDVW

SEQ ID NO: 63696 - protein, 18 aa, Homo sapiens
CATAPTKSNHYYYYMDVW

SEQ ID NO: 63697 - protein, 16 aa, Homo sapiens
CAKGDYDSLNDAFDIW

SEQ ID NO: 63698 - protein, 12 aa, Homo sapiens
CAAKLGSSTDYW

SEQ ID NO: 63699 - protein, 20 aa, Homo sapiens
CASYRLDRGYDFWSGYLYYW

SEQ ID NO: 63700 - protein, 20 aa, Homo sapiens
CAGTLYKWNKGQRTYYFDYW

SEQ ID NO: 63701 - protein, 23 aa, Homo sapiens
CVKASTGRYCSGGRCPIEYFDSW

SEQ ID NO: 63702 - protein, 22 aa, Homo sapiens
CATGPLLWFGELFRYYYYMDVW

SEQ ID NO: 63703 - protein, 18 aa, Homo sapiens
CALWGTTVTRNDWYFDLW

SEQ ID NO: 63704 - protein, 25 aa, Homo sapiens
CASGWCSSTSCYRGPSFYYYYMDVW

SEQ ID NO: 63705 - protein, 15 aa, Homo sapiens
CARAPTLTEPYFDQW

SEQ ID NO: 63706 - protein, 16 aa, Homo sapiens
CARVDDFWSDDAFDIW

SEQ ID NO: 63707 - protein, 11 aa, Homo sapiens
CFLSYRGARIF

SEQ ID NO: 63708 - protein, 39 aa, Homo sapiens
CLYLDMYSLRAEDTALYYCAKEGSNDYGSMTHGFAFDIW

SEQ ID NO: 63709 - protein, 20 aa, Homo sapiens
CVKDNRETYYYDSSGYFDYW

SEQ ID NO: 63710 - protein, 19 aa, Homo sapiens
CARDHDNSGYYFGGQADYW

SEQ ID NO: 63711 - protein, 14 aa, Homo sapiens
CARIQATVNSFDYW

SEQ ID NO: 63712 - protein, 13 aa, Homo sapiens
CTSSSYYEFFDYW

SEQ ID NO: 63713 - protein, 17 aa, Homo sapiens
CARGPRGYDSFGYFDYW

SEQ ID NO: 63714 - protein, 12 aa, Homo sapiens [sequence omitted]

SEQ ID NO: 63715 - protein, 19 aa, Homo sapiens
CARDDGSKHFSTDSAMDVW

SEQ ID NO: 63716 - protein, 16 aa, Homo sapiens
CARAQAPPDWGWFDPW

SEQ ID NO: 63717 - protein, 17 aa, Homo sapiens
CAKARSPNFRFDAPAIW

SEQ ID NO: 63718 - protein, 19 aa, Homo sapiens
CATDSGDFWSGYLTGFDPW

SEQ ID NO: 63719 - protein, 18 aa, Homo sapiens
CASTIFGVAIGMYYFDYW

SEQ ID NO: 63720 - protein, 18 aa, Homo sapiens
CARADGRQIYYYYGMDVW

SEQ ID NO: 63721 - protein, 17 aa, Homo sapiens
CARTGTSGFYYRVIDYW

SEQ ID NO: 63722 - protein, 13 aa, Homo sapiens
CASGTPGGEFDLW

SEQ ID NO: 63723 - protein, 19 aa, Homo sapiens
CAKPPMLYFDSTSSPADYW

SEQ ID NO: 63724 - protein, 20 aa, Homo sapiens
CATDTVVVVGAPGNYAFDIW

SEQ ID NO: 63725 - protein, 21 aa, Homo sapiens
CARDISSSWHRTFDYNWFDPW

SEQ ID NO: 63726 - protein, 16 aa, Homo sapiens
CAKDWDAWGHASIDYW

SEQ ID NO: 63727 - protein, 17 aa, Homo sapiens
CAKDLYGYGRLGRFDYW

SEQ ID NO: 63728 - protein, 17 aa, Homo sapiens
CAREDSSGYHEDYFDYW

SEQ ID NO: 63729 - protein, 20 aa, Homo sapiens
CARLGPYDSSGYYEVAFDIW

SEQ ID NO: 63730 - protein, 19 aa, Homo sapiens
CARVPRITIFGVVSYMDVW

SEQ ID NO: 63731 - protein, 17 aa, Homo sapiens
CARDLEVTIFGVVIDYW

SEQ ID NO: 63732 - protein, 15 aa, Homo sapiens
CARIAKYALTWVDYW

SEQ ID NO: 63733 - protein, 16 aa, Homo sapiens
CASRGYSGFDTYFEYW

SEQ ID NO: 63734 - protein, 21 aa, Homo sapiens
CATGEYNWNGPHLDYYYMDVW

SEQ ID NO: 63735 - protein, 16 aa, Homo sapiens
CAKSPFGSSLDYFDSW

SEQ ID NO: 63736 - protein, 13 aa, Homo sapiens
CMQALHTPPGLTF

SEQ ID NO: 63737 - protein, 21 aa, Homo sapiens
CARGRKTYYDFWSGYYLFDYW

SEQ ID NO: 63738 - protein, 16 aa, Homo sapiens
CAHWNTYGSKRGFDYW

SEQ ID NO: 63739 - protein, 24 aa, Homo sapiens
CAKDRAPGYSYGYFKNVYYGFDYW

SEQ ID NO: 63740 - protein, 12 aa, Homo sapiens
CVKDFTWSFDYW

SEQ ID NO: 63741 - protein, 16 aa, Homo sapiens
CAKDDGGWYSMCFDYW

SEQ ID NO: 63742 - protein, 25 aa, Homo sapiens
CARDGSGSYYNMITSYYYYYGMDVW

SEQ ID NO: 63743 - protein, 23 aa, Homo sapiens
CARPGYDYVWGSPITYYYYMDVW

SEQ ID NO: 63744 - protein, 20 aa, Homo sapiens
CAISYHSGAGSYYVQPFDSW

SEQ ID NO: 63745 - protein, 23 aa, Homo sapiens
CAKDDVLLPALRLNNHPYYMDVW

SEQ ID NO: 63746 - protein, 19 aa, Homo sapiens
CARHERAYNHEIRYYFDYW

SEQ ID NO: 63747 - protein, 12 aa, Homo sapiens
CTSYWDNWFDPW

SEQ ID NO: 63748 - protein, 24 aa, Homo sapiens
CARAGVRVVPAAMREYYYYGMDVW

SEQ ID NO: 63749 - protein, 15 aa, Homo sapiens
CARDFSGGASGFDIW

SEQ ID NO: 63750 - protein, 21 aa, Homo sapiens
CAKSFRNAALASDWLYYFEYW

SEQ ID NO: 63751 - protein, 20 aa, Homo sapiens
CARHSRSHVVVIEDVAFDYW

SEQ ID NO: 63752 - protein, 15 aa, Homo sapiens
CARVPVAAAGSGDYW

SEQ ID NO: 63753 - protein, 19 aa, Homo sapiens
CARQGDTSSWYTIDWFDPW

SEQ ID NO: 63754 - protein, 20 aa, Homo sapiens
CARDKSDHYVPYYYFGMDVW

SEQ ID NO: 63755 - protein, 19 aa, Homo sapiens
CVKDFISLSYYKDHGFDYW

SEQ ID NO: 63756 - protein, 12 aa, Homo sapiens
CQQSYNTLGLTF

SEQ ID NO: 63757 - protein, 25 aa, Homo sapiens
CARDRGGDEWITIFGVVPLNRLDPW

SEQ ID NO: 63758 - protein, 17 aa, Homo sapiens
CAKGGWYGSPDDAFDIW

SEQ ID NO: 63759 - protein, 16 aa, Homo sapiens
CVRHTDWGSANWFDPW

SEQ ID NO: 63760 - protein, 16 aa, Homo sapiens
CATLYSSSWFSPFDYW

SEQ ID NO: 63761 - protein, 20 aa, Homo sapiens
CAKGRPQPYSSSSSWYFDLW

SEQ ID NO: 63762 - protein, 21 aa, Homo sapiens
CVRGLDSGTYFGHRPYQFDFW

SEQ ID NO: 63763 - protein, 20 aa, Homo sapiens
CATDPSMVRGLGGFYWFDPW

SEQ ID NO: 63764 - protein, 18 aa, Homo sapiens
CARAGWISSGWYNWFDPW

SEQ ID NO: 63765 - protein, 22 aa, Homo sapiens
CARLVYDGSGYFYYYYYGMDVW

SEQ ID NO: 63766 - protein, 13 aa, Homo sapiens
CQSADTSGYFYFF

SEQ ID NO: 63767 - protein, 14 aa, Homo sapiens
CARELYTTHTFDFW

SEQ ID NO: 63768 - protein, 19 aa, Homo sapiens
CATSPKLDYYDSSGYLDYW

SEQ ID NO: 63769 - protein, 22 aa, Homo sapiens
CARGGRIDYGDYVAGFGAFDIW

SEQ ID NO: 63770 - protein, 15 aa, Homo sapiens
CAKAPRQLWDPFDYW

SEQ ID NO: 63771 - protein, 18 aa, Homo sapiens
CARSGGGRYGSGSYCTYW

SEQ ID NO: 63772 - protein, 21 aa, Homo sapiens
CAKGNGPLVTPWGSGSYLVYW

SEQ ID NO: 63773 - protein, 20 aa, Homo sapiens
CAREVLSGYSYGSGYYFDYW

SEQ ID NO: 63774 - protein, 24 aa, Homo sapiens
CTTEPLHTDERWLQTHYYYGMDVW

SEQ ID NO: 63775 - protein, 20 aa, Homo sapiens
CARMPKIVLSGWYDWYFDLW

SEQ ID NO: 63776 - protein, 16 aa, Homo sapiens
CARIRVGIAAAGIDYW

SEQ ID NO: 63777 - protein, 17 aa, Homo sapiens
CARQVVPAATRIYFDYW

SEQ ID NO: 63778 - protein, 18 aa, Homo sapiens
CARDGGAYPPAYWYFDLW

SEQ ID NO: 63779 - protein, 18 aa, Homo sapiens
CARDMTANLYYYYGMDVW

SEQ ID NO: 63780 - protein, 22 aa, Homo sapiens
CARGADSSGYSSLFNTYYMDVW

SEQ ID NO: 63781 - protein, 19 aa, Homo sapiens
CARAYGDFGQFYYDYMDVW

SEQ ID NO: 63782 - protein, 14 aa, Homo sapiens
CAKSSGLIRMFDYW

SEQ ID NO: 63783 - protein, 23 aa, Homo sapiens
CARGGKITIFGVVIHYYYGMDVW

SEQ ID NO: 63784 - protein, 15 aa, Homo sapiens
CARPYSASYSGFDMW

SEQ ID NO: 63785 - protein, 25 aa, Homo sapiens
CARVSYDFWTNDPTQQYYYYYIDVW

SEQ ID NO: 63786 - protein, 21 aa, Homo sapiens
CARDYIRSSSGKYYYYGMDVW

SEQ ID NO: 63787 - protein, 17 aa, Homo sapiens
CASGGSGTYYVWAWDYW

SEQ ID NO: 63788 - protein, 20 aa, Homo sapiens
CARDFAKGGNSGFEATFDYW

SEQ ID NO: 63789 - protein, 15 aa, Homo sapiens
CARVTDPRRPLFNYW

SEQ ID NO: 63790 - protein, 17 aa, Homo sapiens
CAKGRGGGYYSNWFDPW

SEQ ID NO: 63791 - protein, 14 aa, Homo sapiens
CAKGYSGYDYQDYW

SEQ ID NO: 63792 - protein, 16 aa, Homo sapiens
CVKDFRVGFSNTFDYW

SEQ ID NO: 63793 - protein, 21 aa, Homo sapiens
CARQGVDRIVVVITTLHFDYW

SEQ ID NO: 63794 - protein, 20 aa, Homo sapiens
CARRLVVVTPTTTYDAFDVW

SEQ ID NO: 63795 - protein, 16 aa, Homo sapiens
CARTQYSSGHTKIDYW

SEQ ID NO: 63796 - protein, 19 aa, Homo sapiens
CARDYYYASGTYSYYFDHW

SEQ ID NO: 63797 - protein, 16 aa, Homo sapiens
CVRSVATAGLLWFDRW

SEQ ID NO: 63798 - protein, 22 aa, Homo sapiens
CARAQYYYDSIGYVYSYYMDVW

SEQ ID NO: 63799 - protein, 20 aa, Homo sapiens
CARGGDSNSYPPRYTWFDPW

SEQ ID NO: 63800 - protein, 14 aa, Homo sapiens
CARDSYDPAGTDYW

SEQ ID NO: 63801 - protein, 16 aa, Homo sapiens
CARGGGGYDAIDLDYW

SEQ ID NO: 63802 - protein, 15 aa, Homo sapiens
CARPPFLPTGYFDYW

SEQ ID NO: 63803 - protein, 19 aa, Homo sapiens
CARGYETSDDYGDYWFDPW

SEQ ID NO: 63804 - protein, 26 aa, Homo sapiens
CAHMGRVTDPIITIFGVVISYYFDYW

SEQ ID NO: 63805 - protein, 18 aa, Homo sapiens
CARIRPDPVGTMGWFDPW

SEQ ID NO: 63806 - protein, 14 aa, Homo sapiens
CARMDSTVISYDYW

SEQ ID NO: 63807 - protein, 27 aa, Homo sapiens
CAKDKLRKITIFGVVIDHYYYYGMDVW

SEQ ID NO: 63808 - protein, 17 aa, Homo sapiens
CARRRQVTNRDFYVDFW

SEQ ID NO: 63809 - protein, 15 aa, Homo sapiens
CARDYGGVVAVFDYW

SEQ ID NO: 63810 - protein, 13 aa, Homo sapiens
CASSSSGGPFDTW

SEQ ID NO: 63811 - protein, 22 aa, Homo sapiens
CANLGIVVVPAAMLTTDAFDIW

SEQ ID NO: 63812 - protein, 18 aa, Homo sapiens
CWARSKELAWIQLRFDYW

SEQ ID NO: 63813 - protein, 27 aa, Homo sapiens
CARDLSDCSSTSCYGGGFYYYYGMDVW

SEQ ID NO: 63814 - protein, 18 aa, Homo sapiens
CAKDMGITMIAYDAFDIW

SEQ ID NO: 63815 - protein, 16 aa, Homo sapiens
CARDLGWLGRDAFDIW

SEQ ID NO: 63816 - protein, 21 aa, Homo sapiens
CARHPLYCSSTSCYTGHLDYW

SEQ ID NO: 63817 - protein, 14 aa, Homo sapiens
CARDGELLDALDFW

SEQ ID NO: 63818 - protein, 18 aa, Homo sapiens
CARIGLPLRRYSYYMDVW

SEQ ID NO: 63819 - protein, 17 aa, Homo sapiens
CASTVTDYFSYYYMDVW

SEQ ID NO: 63820 - protein, 16 aa, Homo sapiens
CARERRDGYNGPLDYW

SEQ ID NO: 63821 - protein, 23 aa, Homo sapiens
CARLTAGYCSSTSCYKGLGFDYW

SEQ ID NO: 63822 - protein, 26 aa, Homo sapiens
CARAPLPDTAIITIFGVVTTPYFDYW

SEQ ID NO: 63823 - protein, 15 aa, Homo sapiens
CARDGFLYSGSFDFW

SEQ ID NO: 63824 - protein, 16 aa, Homo sapiens
CAKDHLVYDSDGFDIW

SEQ ID NO: 63825 - protein, 14 aa, Homo sapiens
CARKVGGIQYFDYW

SEQ ID NO: 63826 - protein, 15 aa, Homo sapiens
CATAGTVYYDALDSW

SEQ ID NO: 63827 - protein, 17 aa, Homo sapiens
CARIHYGDYDHDAFDIW

SEQ ID NO: 63828 - protein, 15 aa, Homo sapiens
CARDQPGGSYTFDYW

SEQ ID NO: 63829 - protein, 17 aa, Homo sapiens
CARDYGGLLSVIWFDSW

SEQ ID NO: 63830 - protein, 15 aa, Homo sapiens
CARMWAKQHLGFDPW

SEQ ID NO: 63831 - protein, 16 aa, Homo sapiens
CAKDLVGILGDAVDIW

SEQ ID NO: 63832 - protein, 15 aa, Homo sapiens
CVRVSEPEIGPVDYW

SEQ ID NO: 63833 - protein, 15 aa, Homo sapiens
CAHSSTFLWVWFDPW

SEQ ID NO: 63834 - protein, 18 aa, Homo sapiens
CARHDYSNSYYYYGVDVW

SEQ ID NO: 63835 - protein, 26 aa, Homo sapiens
CAREEGLTIFGVVITKAPYYYGMDVW

SEQ ID NO: 63836 - protein, 25 aa, Homo sapiens
CARPRDIVVVPAAPPLLDVDAFDIW

SEQ ID NO: 63837 - protein, 14 aa, Homo sapiens
CARGGYSYGYIGYW

SEQ ID NO: 63838 - protein, 22 aa, Homo sapiens
CARECTSTIFGVVIIPSYFDYW

SEQ ID NO: 63839 - protein, 14 aa, Homo sapiens
CAIIPDSSGWLDYW

SEQ ID NO: 63840 - protein, 36 aa, Homo sapiens
CSLKLNSVTAADTAVYYCAREGLVEQYYYSYGLDVW

SEQ ID NO: 63841 - protein, 19 aa, Homo sapiens
CARDKEAGVQLFLDAFDIW

SEQ ID NO: 63842 - protein, 22 aa, Homo sapiens
CATGPTIFGVVIGSYYYGMDVW

SEQ ID NO: 63843 - protein, 17 aa, Homo sapiens
CAHTALNIAVAGTLDYW

SEQ ID NO: 63844 - protein, 22 aa, Homo sapiens
CARHGSSYDFWSGYSPHWFDPW

SEQ ID NO: 63845 - protein, 12 aa, Homo sapiens
CARVNFYYVDVW

SEQ ID NO: 63846 - protein, 16 aa, Homo sapiens
CARDSSSLHYYYMDVW

SEQ ID NO: 63847 - protein, 18 aa, Homo sapiens
CARGGWSTMRKKYYFDYW

SEQ ID NO: 63848 - protein, 13 aa, Homo sapiens
CARGYGPQAIDYW

SEQ ID NO: 63849 - protein, 25 aa, Homo sapiens
CARRVGGHDYITYKPNYYYYYMDVW

SEQ ID NO: 63850 - protein, 19 aa, Homo sapiens
CARDPAIDEFGDYSWFDPW

SEQ ID NO: 63851 - protein, 27 aa, Homo sapiens
CVHEATESRHHYYDSSGFFSIEPFDVW

SEQ ID NO: 63852 - protein, 19 aa, Homo sapiens
CARDQGDFWSGSPCHFDSW

SEQ ID NO: 63853 - protein, 17 aa, Homo sapiens
CARGSYCSGNSCYFDYW

SEQ ID NO: 63854 - protein, 26 aa, Homo sapiens
CARGRPVGGEVTIFGVVSYYYYMDVW

SEQ ID NO: 63855 - protein, 23 aa, Homo sapiens
CARRLPGYCSSTSCYRGFYFDYW

SEQ ID NO: 63856 - protein, 17 aa, Homo sapiens
CARVRCSGGSCYHIDYW

SEQ ID NO: 63857 - protein, 17 aa, Homo sapiens
CAKDKPVRYSSDAFDIW

SEQ ID NO: 63858 - protein, 23 aa, Homo sapiens
CARHLPQWVGYSSSWSPTHFDYW

SEQ ID NO: 63859 - protein, 19 aa, Homo sapiens
CAARLRYFDAISIQPLDYW

SEQ ID NO: 63860 - protein, 15 aa, Homo sapiens
CARIRMLPELAMDYW

SEQ ID NO: 63861 - protein, 18 aa, Homo sapiens
CAKDPHYDFWSAQAYDYW

SEQ ID NO: 63862 - protein, 15 aa, Homo sapiens
CVKEGEVVAGTFDYW

SEQ ID NO: 63863 - protein, 19 aa, Homo sapiens
CAKDPKSLTISSTTYMDVW

SEQ ID NO: 63864 - protein, 20 aa, Homo sapiens
CARDGRLMVYAYYYYGMDVW

SEQ ID NO: 63865 - protein, 20 aa, Homo sapiens
CARCGYSYGYYNHYYYMDVW

SEQ ID NO: 63866 - protein, 18 aa, Homo sapiens
CASLPAAIHLYYYYMDVW

SEQ ID NO: 63867 - protein, 20 aa, Homo sapiens
CAGGFFDNSDFYRWWYFDLW

SEQ ID NO: 63868 - protein, 16 aa, Homo sapiens
CARVGSSAWDYYFDYW

SEQ ID NO: 63869 - protein, 17 aa, Homo sapiens
CAREEGIYSPRWSFDSW

SEQ ID NO: 63870 - protein, 17 aa, Homo sapiens
CEQWLFTDSGSYGFDVW

SEQ ID NO: 63871 - protein, 15 aa, Homo sapiens
CARNNYGDLVVFDPW

SEQ ID NO: 63872 - protein, 23 aa, Homo sapiens
CTRVRAYYDILTGFTEQNWFDPW

SEQ ID NO: 63873 - protein, 14 aa, Homo sapiens
CARVSGAWRDFDSW

SEQ ID NO: 63874 - protein, 24 aa, Homo sapiens
CARVAYSNYGRGGIYYYYYYMDVW

SEQ ID NO: 63875 - protein, 16 aa, Homo sapiens
CAKGWEGVVGNAFDFW

SEQ ID NO: 63876 - protein, 11 aa, Homo sapiens
CQQLKTYPGAF

SEQ ID NO: 63877 - protein, 14 aa, Homo sapiens
CAIMGWEPHLFDYW

SEQ ID NO: 63878 - protein, 20 aa, Homo sapiens
CASIHSYYYDSSGYVNFDYW

SEQ ID NO: 63879 - protein, 17 aa, Homo sapiens
CAKVTGIAAAGRGLDYW

SEQ ID NO: 63880 - protein, 15 aa, Homo sapiens
CASILLFSPYGFDPW

SEQ ID NO: 63881 - protein, 17 aa, Homo sapiens
CAKVLQGVIIGLSFDSW

SEQ ID NO: 63882 - protein, 16 aa, Homo sapiens
CARTPVGATLGGFDYW

SEQ ID NO: 63883 - protein, 17 aa, Homo sapiens
CASSRITMIVVNAFDIW

SEQ ID NO: 63884 - protein, 21 aa, Homo sapiens
CARNRGALRFLEWSEYYFDYW

SEQ ID NO: 63885 - protein, 22 aa, Homo sapiens
CARGAYRGRMVVVAASGWFDPW

SEQ ID NO: 63886 - protein, 15 aa, Homo sapiens
CATGRLGVSTIIDYW

SEQ ID NO: 63887 - protein, 22 aa, Homo sapiens
CARDPGAHCSGGICYQSKFDYW

SEQ ID NO: 63888 - protein, 25 aa, Homo sapiens
CARDQRRGGYGRTKRYYYYYGMDVW

SEQ ID NO: 63889 - protein, 16 aa, Homo sapiens
CAKDRRMGSWDAFDIW

SEQ ID NO: 63890 - protein, 20 aa, Homo sapiens
CGRHAPISPSFDSAWYIDYW

SEQ ID NO: 63891 - protein, 20 aa, Homo sapiens
CTTDLYYYDSGTYSSAFDHW

SEQ ID NO: 63892 - protein, 13 aa, Homo sapiens
CARNGDFEPFDSW

SEQ ID NO: 63893 - protein, 17 aa, Homo sapiens
CARHVTGGTGLHYFDYW

SEQ ID NO: 63894 - protein, 19 aa, Homo sapiens
CANQGRIAASRRGGSFDYW

SEQ ID NO: 63895 - protein, 22 aa, Homo sapiens
CARDNLWAGIAVAGSTGWFDYW

SEQ ID NO: 63896 - protein, 23 aa, Homo sapiens
CARGPYDILTGYFSYYYYGMDVW

SEQ ID NO: 63897 - protein, 25 aa, Homo sapiens
CARDTYAMVRGGDRGYYYYYGMDVW

SEQ ID NO: 63898 - protein, 14 aa, Homo sapiens
CATVADSSFIFDYW

SEQ ID NO: 63899 - protein, 14 aa, Homo sapiens
CVRDGDGDDPIDYW

SEQ ID NO: 63900 - protein, 16 aa, Homo sapiens
CARSTVTLRLYYFDFW

SEQ ID NO: 63901 - protein, 16 aa, Homo sapiens
CARHSGFDGGDAFDFW

SEQ ID NO: 63902 - protein, 18 aa, Homo sapiens
CTKDKCPGATSCFAFDYW

SEQ ID NO: 63903 - protein, 18 aa, Homo sapiens
CAKDMVRGVVVVVAPDYW

SEQ ID NO: 63904 - protein, 21 aa, Homo sapiens
CALSPVVFRVVRNPYDAFDIW

SEQ ID NO: 63905 - protein, 17 aa, Homo sapiens
CARHYDYVWGSYPFDYW

SEQ ID NO: 63906 - protein, 15 aa, Homo sapiens
CASTGERSHDAFDIW

SEQ ID NO: 63907 - protein, 17 aa, Homo sapiens
CVRDKRLDSSIPLFDCW

SEQ ID NO: 63908 - protein, 25 aa, Homo sapiens
CARAFPGRGFDWLFHSDYYYGMDVW

SEQ ID NO: 63909 - protein, 16 aa, Homo sapiens
CASPFQGYNYNAFDIW

SEQ ID NO: 63910 - protein, 22 aa, Homo sapiens
CAIGRQVASPRYYYYYYGMDVW

SEQ ID NO: 63911 - protein, 12 aa, Homo sapiens
CGTGRIQVEDYW

SEQ ID NO: 63912 - protein, 16 aa, Homo sapiens
CALPLGWELSGHFDIW

SEQ ID NO: 63913 - protein, 23 aa, Homo sapiens
CTKGYYGSGTYRPTTLLRDFDYW

SEQ ID NO: 63914 - protein, 18 aa, Homo sapiens
CARAAEEDYLAGRYYDYW

SEQ ID NO: 63915 - protein, 22 aa, Homo sapiens
CARGDDIPGWSGYFLRGAFDIW

SEQ ID NO: 63916 - protein, 17 aa, Homo sapiens
CARVAMISGTMAAFDVW

SEQ ID NO: 63917 - protein, 13 aa, Homo sapiens
CAKDSSSWYLGYW

SEQ ID NO: 63918 - protein, 13 aa, Homo sapiens
CARISSGTVADYW

SEQ ID NO: 63919 - protein, 17 aa, Homo sapiens
CAKVAPVAGTGRYFDYW

SEQ ID NO: 63920 - protein, 16 aa, Homo sapiens
CATEAYDSSGYTFDFW

SEQ ID NO: 63921 - protein, 18 aa, Homo sapiens
CARVSLIPAAYTNYFDSW

SEQ ID NO: 63922 - protein, 18 aa, Homo sapiens
CAKDYSSGWSPTYYFDYW

SEQ ID NO: 63923 - protein, 24 aa, Homo sapiens
CAKALPYDSNGQYYWDPGYYFDYW

SEQ ID NO: 63924 - protein, 15 aa, Homo sapiens
CAKSSDWRFEGFDMW

SEQ ID NO: 63925 - protein, 21 aa, Homo sapiens
CARDRRGSNYGPSRIYYFDYW

SEQ ID NO: 63926 - protein, 20 aa, Homo sapiens
CARAGWNTMVRGVPHWFDPW

SEQ ID NO: 63927 - protein, 18 aa, Homo sapiens
CARGSSGWLSYVYYFDYW

SEQ ID NO: 63928 - protein, 18 aa, Homo sapiens
CATMESGYRIKNWYFDLW

SEQ ID NO: 63929 - protein, 23 aa, Homo sapiens
CARDHSYYFDSDGYYFPNALDVW

SEQ ID NO: 63930 - protein, 21 aa, Homo sapiens
CAKDRQGYCRTTFCYGGFDSW

SEQ ID NO: 63931 - protein, 19 aa, Homo sapiens
CARDPSYGSGSYTNWFDPW

SEQ ID NO: 63932 - protein, 16 aa, Homo sapiens
CARDPVGTTPNWFDPW

SEQ ID NO: 63933 - protein, 16 aa, Homo sapiens
CARTRQYAHYAPFDYW

SEQ ID NO: 63934 - protein, 18 aa, Homo sapiens
CAHRVGPPYIDYSWFDPW

SEQ ID NO: 63935 - protein, 23 aa, Homo sapiens
CARRERYFDWLSQDYYYYYMDVW

SEQ ID NO: 63936 - protein, 20 aa, Homo sapiens
CARTFYDYVWYTYRYYFDYW

SEQ ID NO: 63937 - protein, 19 aa, Homo sapiens
CATDRNHHYYDSSGLFDYW

SEQ ID NO: 63938 - protein, 21 aa, Homo sapiens
CTRVGTDSSGYYDHPDAFDIW

SEQ ID NO: 63939 - protein, 14 aa, Homo sapiens
CAREDYGDPNVDYW

SEQ ID NO: 63940 - protein, 19 aa, Homo sapiens
CARATQLYSGYDYFAFDSW

SEQ ID NO: 63941 - protein, 11 aa, Homo sapiens
CARGTFYFALW

SEQ ID NO: 63942 - protein, 26 aa, Homo sapiens
CARGRGMYYYDSSGYYPTFVDWFDPW

SEQ ID NO: 63943 - protein, 14 aa, Homo sapiens
CAKDMAYYYGMDVW

SEQ ID NO: 63944 - protein, 23 aa, Homo sapiens
CARDFAVSDDSSGRYYYYGMDVW

SEQ ID NO: 63945 - protein, 19 aa, Homo sapiens
CAGEKAAAGVGYYYGMDVW

SEQ ID NO: 63946 - protein, 14 aa, Homo sapiens
CARVHIGMAVFDYW

SEQ ID NO: 63947 - protein, 18 aa, Homo sapiens
CAKDIKSESYYYYTMDVW

SEQ ID NO: 63948 - protein, 24 aa, Homo sapiens
CAKDLFGYSYGLRQYYYYYGMDVW

SEQ ID NO: 63949 - protein, 16 aa, Homo sapiens
CARGRNYGSVNWFAPW

SEQ ID NO: 63950 - protein, 18 aa, Homo sapiens
CAKLVVVAATWGYFFDYW

SEQ ID NO: 63951 - protein, 21 aa, Homo sapiens
CARGWKFDDFWSGSNWYFDLW

SEQ ID NO: 63952 - protein, 17 aa, Homo sapiens
CARSMGDFWRGRGFDLW

SEQ ID NO: 63953 - protein, 15 aa, Homo sapiens
CARTIHPHSGKFDYW

SEQ ID NO: 63954 - protein, 24 aa, Homo sapiens
CAKDRIRYCSGGSCSYYYYGMDVW

SEQ ID NO: 63955 - protein, 17 aa, Homo sapiens
CAREPQWLVLLDAFDIW

SEQ ID NO: 63956 - protein, 12 aa, Homo sapiens
CMQALPTLMSTF

SEQ ID NO: 63957 - protein, 21 aa, Homo sapiens
CARDHDWTLTIGDYYYGMDVW

SEQ ID NO: 63958 - protein, 24 aa, Homo sapiens
CAKDSYYYGSGSYNYYYYYGMDVW

SEQ ID NO: 63959 - protein, 22 aa, Homo sapiens
CAKDIYYYDNKGDRTTYYFDDW

SEQ ID NO: 63960 - protein, 19 aa, Homo sapiens
CGRDSRVFLIGADYYFDSW

SEQ ID NO: 63961 - protein, 13 aa, Homo sapiens
CATGPTVPPFAYW

SEQ ID NO: 63962 - protein, 18 aa, Homo sapiens
CARPLSGSYLWYYGMDVW

SEQ ID NO: 63963 - protein, 21 aa, Homo sapiens
CVKQSTGWVFNVYYYYGLDVW

SEQ ID NO: 63964 - protein, 24 aa, Homo sapiens
CARDYGCRDTRESSRYFRCRFDPW

SEQ ID NO: 63965 - protein, 24 aa, Homo sapiens
CAKGYCSSTSCPYAYYYYYYMDVW

SEQ ID NO: 63966 - protein, 22 aa, Homo sapiens
CARDLYDYVWGSYSALGAFDIW

SEQ ID NO: 63967 - protein, 24 aa, Homo sapiens
CARDKGDDDYVWGSYRQTTSLDYW

SEQ ID NO: 63968 - protein, 18 aa, Homo sapiens
CARVKTAFWRGNDAFDVW

SEQ ID NO: 63969 - protein, 14 aa, Homo sapiens
CAAAPQKYGEFHYW

SEQ ID NO: 63970 - protein, 23 aa, Homo sapiens
CARGGYINVAGTFSYYYYGMDVW

SEQ ID NO: 63971 - protein, 19 aa, Homo sapiens
CARDLKRRNDYGDYGADYW

SEQ ID NO: 63972 - protein, 21 aa, Homo sapiens
CARQEAVYYYGSGSYRGFDYW

SEQ ID NO: 63973 - protein, 16 aa, Homo sapiens
CARAPWEGYQSPFDNW

SEQ ID NO: 63974 - protein, 16 aa, Homo sapiens
CAKAKGSSSWYEVDYW

SEQ ID NO: 63975 - protein, 17 aa, Homo sapiens
CATLGGSYMGREAFDFW

SEQ ID NO: 63976 - protein, 18 aa, Homo sapiens
CARESDDFSTNTYYFDYW

SEQ ID NO: 63977 - protein, 16 aa, Homo sapiens
CAHRSEGVVGEGYDYW

SEQ ID NO: 63978 - protein, 16 aa, Homo sapiens
CAHRRGRSWNWWFDPW

SEQ ID NO: 63979 - protein, 18 aa, Homo sapiens
CAKYTPDADGFYHFFDYW

SEQ ID NO: 63980 - protein, 16 aa, Homo sapiens
CATDRAPTESNYFEEW

SEQ ID NO: 63981 - protein, 18 aa, Homo sapiens
CAKDGSDKSGWFEYFHHW

SEQ ID NO: 63982 - protein, 17 aa, Homo sapiens
CVKGGYSHISRSGFDTW

SEQ ID NO: 63983 - protein, 17 aa, Homo sapiens
CANFGPSGDPKYFFDYW

SEQ ID NO: 63984 - protein, 15 aa, Homo sapiens
CARDGNWNRQYFQRW

SEQ ID NO: 63985 - protein, 22 aa, Homo sapiens
CARNGWAHTEKNYYYYYYMDVW

SEQ ID NO: 63986 - protein, 17 aa, Homo sapiens
CAKDLEAAMSARTFDQW

SEQ ID NO: 63987 - protein, 18 aa, Homo sapiens
CARSGIQLWDAARYFDLW

SEQ ID NO: 63988 - protein, 21 aa, Homo sapiens
CASWDLYSSGYYARSGAFDIW

SEQ ID NO: 63989 - protein, 18 aa, Homo sapiens
CARGSSTPVAGYNFFDPW

SEQ ID NO: 63990 - protein, 23 aa, Homo sapiens
CTTYASHYDFWSGVPFYYYMDVW

SEQ ID NO: 63991 - protein, 16 aa, Homo sapiens
CATESPLSVGATFDYW

SEQ ID NO: 63992 - protein, 19 aa, Homo sapiens
CATDAYSGSYWGSHNFDYW

SEQ ID NO: 63993 - protein, 14 aa, Homo sapiens
CVVTIFGLPDFDYW

SEQ ID NO: 63994 - protein, 18 aa, Homo sapiens
CAKDIGSIAARPHYFDYW

SEQ ID NO: 63995 - protein, 15 aa, Homo sapiens
CAREGGAYGDGFDPW

SEQ ID NO: 63996 - protein, 18 aa, Homo sapiens
CARGWTILGVFNNWFDPW

SEQ ID NO: 63997 - protein, 25 aa, Homo sapiens
CARVLLTYYYDSSGYYPSRLAFDIW

SEQ ID NO: 63998 - protein, 28 aa, Homo sapiens
CARHFLGRITIFGVVIESKVTAYYFDYW

SEQ ID NO: 63999 - protein, 14 aa, Homo sapiens
CVRTYSVSSGGDYW

SEQ ID NO: 64000 - protein, 12 aa, Homo sapiens
CAGELLRGFDYW

SEQ ID NO: 64001 - protein, 24 aa, Homo sapiens
CARDVFSSGEEGLYYYYYYGMDVW

SEQ ID NO: 64002 - protein, 13 aa, Homo sapiens
CQVWESSTDREVF

SEQ ID NO: 64003 - protein, 20 aa, Homo sapiens
CAREEYQLMGQFYYYGMDVW

SEQ ID NO: 64004 - protein, 21 aa, Homo sapiens
CASQKTYCSSTSCYARWFDPW

SEQ ID NO: 64005 - protein, 19 aa, Homo sapiens
CAKDISIAARFPLGAFDIW

SEQ ID NO: 64006 - protein, 16 aa, Homo sapiens
CARHSGGMVRGVIDYW

SEQ ID NO: 64007 - protein, 19 aa, Homo sapiens
CARGPFPGSGWIDTGYDYW

SEQ ID NO: 64008 - protein, 20 aa, Homo sapiens
CASLGYYGSRYYYYYGMDVW

SEQ ID NO: 64009 - protein, 15 aa, Homo sapiens
CARATVPAAIRFDPW

SEQ ID NO: 64010 - protein, 21 aa, Homo sapiens
CARRRSGTILFDYYYYGMDVW

SEQ ID NO: 64011 - protein, 11 aa, Homo sapiens
CQSADSRGIIF

SEQ ID NO: 64012 - protein, 20 aa, Homo sapiens
CAKDHLVVATEYYYYGMDVW

SEQ ID NO: 64013 - protein, 24 aa, Homo sapiens
CSRDTIMLRGVIVLASVPDAFDIW

SEQ ID NO: 64014 - protein, 16 aa, Homo sapiens
CAREEYSSSQQYFDYW

SEQ ID NO: 64015 - protein, 18 aa, Homo sapiens
CARASGSSSWYGDYFDYW

SEQ ID NO: 64016 - protein, 24 aa, Homo sapiens
CARQGCSISSCSCCDHDPAPFDYW

SEQ ID NO: 64017 - protein, 19 aa, Homo sapiens
CAKSARHDFAPYYYYMDVW

SEQ ID NO: 64018 - protein, 17 aa, Homo sapiens
CAKDGPSSSPYELFDYW

SEQ ID NO: 64019 - protein, 21 aa, Homo sapiens
CARDRERYSSGWLTAAWFDPW

SEQ ID NO: 64020 - protein, 21 aa, Homo sapiens
CARVGFESDYDSSAYPYFDYW

SEQ ID NO: 64021 - protein, 17 aa, Homo sapiens
CAQLTGAYDFSNLVDPW

SEQ ID NO: 64022 - protein, 15 aa, Homo sapiens
CVKEILDGGRAFDLW

SEQ ID NO: 64023 - protein, 16 aa, Homo sapiens
CAKGRSYSSGELFDYW

SEQ ID NO: 64024 - protein, 16 aa, Homo sapiens
CAQRQETETSMGFGYW

SEQ ID NO: 64025 - protein, 17 aa, Homo sapiens
CAKGRTDYSNTPDFDFW

SEQ ID NO: 64026 - protein, 18 aa, Homo sapiens
CARGYNFGYYYYHAMDVW

SEQ ID NO: 64027 - protein, 18 aa, Homo sapiens
CVRDKTDTAVVTGAFDVW

SEQ ID NO: 64028 - protein, 21 aa, Homo sapiens
CARGPDDYSNSHYYYYYMDVW

SEQ ID NO: 64029 - protein, 13 aa, Homo sapiens
CARATVHDSFDIW

SEQ ID NO: 64030 - protein, 16 aa, Homo sapiens
CTTGAIGALPNTFDYW

SEQ ID NO: 64031 - protein, 13 aa, Homo sapiens
CTTAHVPWTVDYW

SEQ ID NO: 64032 - protein, 18 aa, Homo sapiens
CARERTRMVTNQDGLDVW

SEQ ID NO: 64033 - protein, 17 aa, Homo sapiens
CARKPYGDYGVDYFDYW

SEQ ID NO: 64034 - protein, 23 aa, Homo sapiens
CAKDTSYCNTPTTCYVSRGFDHW

SEQ ID NO: 64035 - protein, 15 aa, Homo sapiens
CAREGVQLGGLVDYW

SEQ ID NO: 64036 - protein, 11 aa, Homo sapiens
CTRGSWPIDYW

SEQ ID NO: 64037 - protein, 22 aa, Homo sapiens
CARSVTRGFRDILTGVLGFDSW

SEQ ID NO: 64038 - protein, 18 aa, Homo sapiens
CATMGSSGYDFYYGMDVW

SEQ ID NO: 64039 - protein, 12 aa, Homo sapiens
CMQGLDLPRHTF

SEQ ID NO: 64040 - protein, 19 aa, Homo sapiens
CARERGYCSVGTCYAFDYW

SEQ ID NO: 64041 - protein, 13 aa, Homo sapiens
CATGRDWNYYPYW

SEQ ID NO: 64042 - protein, 20 aa, Homo sapiens
CASGPIGSGLVYYYYGMDVW

SEQ ID NO: 64043 - protein, 20 aa, Homo sapiens
CARESHVITFGGVIARFGYW

SEQ ID NO: 64044 - protein, 18 aa, Homo sapiens
CAKDSINSGRYGYHFDYW

SEQ ID NO: 64045 - protein, 18 aa, Homo sapiens
CVKGNFYGEDYYYYMDVW

SEQ ID NO: 64046 - protein, 24 aa, Homo sapiens
CARAGWIRRSMSVPHYYYYGMDVW

SEQ ID NO: 64047 - protein, 14 aa, Homo sapiens
CARGGVRTVGYDYW

SEQ ID NO: 64048 - protein, 18 aa, Homo sapiens
CAKEISTYYYDSSGPDYW

SEQ ID NO: 64049 - protein, 14 aa, Homo sapiens
CARDVDNLPRFDYW

SEQ ID NO: 64050 - protein, 17 aa, Homo sapiens
CASYSSGWRSSVAFDIW

SEQ ID NO: 64051 - protein, 18 aa, Homo sapiens
CATQIVSSGLYSKYFDYW

SEQ ID NO: 64052 - protein, 20 aa, Homo sapiens
CARQRRYFDWLLYIGYFDYW

SEQ ID NO: 64053 - protein, 17 aa, Homo sapiens
CAKAGGYGDYAHYFQSW

SEQ ID NO: 64054 - protein, 20 aa, Homo sapiens
CARDLTMVRGGEYYYGMDVW

SEQ ID NO: 64055 - protein, 23 aa, Homo sapiens
CARGLWTSTILGVGGVLLSIDYW

SEQ ID NO: 64056 - protein, 17 aa, Homo sapiens
CAKDPAAGTPGDAFDIW

SEQ ID NO: 64057 - protein, 21 aa, Homo sapiens
CVRDSRYCSRSSCSNWYFDLW

SEQ ID NO: 64058 - protein, 22 aa, Homo sapiens
CARMQILPARIGVIPTGWFDPW

SEQ ID NO: 64059 - protein, 18 aa, Homo sapiens
CVHCRGYYYDSSAYPDYW

SEQ ID NO: 64060 - protein, 17 aa, Homo sapiens
CTTPITSGPSLYYFDYW

SEQ ID NO: 64061 - protein, 20 aa, Homo sapiens
CAKLGSVVVTAIPEGPFDYW

SEQ ID NO: 64062 - protein, 19 aa, Homo sapiens
CARDSSGVVSPLEGLFDPW

SEQ ID NO: 64063 - protein, 18 aa, Homo sapiens
CAKDLNLYYYDSSGYDYW

SEQ ID NO: 64064 - protein, 26 aa, Homo sapiens
CAKDISPFFYYDNSGYLGVLDAIDIW

SEQ ID NO: 64065 - protein, 21 aa, Homo sapiens
CARDGGDYGKDYYYYYGMDVW

SEQ ID NO: 64066 - protein, 13 aa, Homo sapiens
CAGANWGFPFDFW

SEQ ID NO: 64067 - protein, 18 aa, Homo sapiens
CAKMYYFDSASLSGGDYW

SEQ ID NO: 64068 - protein, 12 aa, Homo sapiens [sequence omitted]

SEQ ID NO: 64069 - protein, 17 aa, Homo sapiens
CARTPYSSSSSPSFDYW

SEQ ID NO: 64070 - protein, 22 aa, Homo sapiens
CATARDFWSGYYTAGTGPFDYW

SEQ ID NO: 64071 - protein, 14 aa, Homo sapiens
CARERNDYAAFDIW

SEQ ID NO: 64072 - protein, 20 aa, Homo sapiens
CARAPCSGGSCYHHDAFDIW

SEQ ID NO: 64073 - protein, 17 aa, Homo sapiens
CATPRHQLQLVSPLDYW

SEQ ID NO: 64074 - protein, 19 aa, Homo sapiens
CARDLRLSHSSSWDYFDYW

SEQ ID NO: 64075 - protein, 19 aa, Homo sapiens
CARVQRYYTVLTGYQIDYW

SEQ ID NO: 64076 - protein, 22 aa, Homo sapiens
CARHGGGALAVIRYYYYAMDVW

SEQ ID NO: 64077 - protein, 22 aa, Homo sapiens
CARGSPYYYGSGNFSQYAFDIW

SEQ ID NO: 64078 - protein, 13 aa, Homo sapiens
CARVTGHEITDYW

SEQ ID NO: 64079 - protein, 15 aa, Homo sapiens
CLSYDKSLSGPHWVF

SEQ ID NO: 64080 - protein, 16 aa, Homo sapiens
CAKAEGEVAAAGSDYW

SEQ ID NO: 64081 - protein, 23 aa, Homo sapiens
CARHPVGGFGIFGVVSHNWFDPW

SEQ ID NO: 64082 - protein, 20 aa, Homo sapiens
CARHVRYYDSSGYFHFGDYW

SEQ ID NO: 64083 - protein, 16 aa, Homo sapiens
CAKDSLRGPFGWFDPW

SEQ ID NO: 64084 - protein, 18 aa, Homo sapiens
CARDGKYLPSLGYYFDNW

SEQ ID NO: 64085 - protein, 22 aa, Homo sapiens
CARGSHVDMIYDIFTGQHFDFW

SEQ ID NO: 64086 - protein, 22 aa, Homo sapiens
CAREKARTIFGVVIYRDAFDIW

SEQ ID NO: 64087 - protein, 15 aa, Homo sapiens
CTPEWVAALYYFDYW

SEQ ID NO: 64088 - protein, 17 aa, Homo sapiens
CAKDIRTIFYYYGMDVW

SEQ ID NO: 64089 - protein, 19 aa, Homo sapiens
CATGRVPIPESYHQYMDVW

SEQ ID NO: 64090 - protein, 16 aa, Homo sapiens
CAHRSTTMRETIFDFW

SEQ ID NO: 64091 - protein, 14 aa, Homo sapiens
CARYRWGPYYFDYW

SEQ ID NO: 64092 - protein, 26 aa, Homo sapiens
CARDRPNTIFGVVTDTYYYYYGMDVW

SEQ ID NO: 64093 - protein, 18 aa, Homo sapiens
CARDTRRIAARPGASDYW

SEQ ID NO: 64094 - protein, 26 aa, Homo sapiens
CARIKYYDFWSGYYDPVGYYYYMDVW

SEQ ID NO: 64095 - protein, 20 aa, Homo sapiens
CARYCFRPSCHSSSFLFDFW

SEQ ID NO: 64096 - protein, 16 aa, Homo sapiens
CAKPYSGSYHDAFDIW

SEQ ID NO: 64097 - protein, 24 aa, Homo sapiens
CTRRLDPYNGFWSGYSLVRPLDYW

SEQ ID NO: 64098 - protein, 22 aa, Homo sapiens
CARFYCRGGSCSPTYYYGMDVW

SEQ ID NO: 64099 - protein, 16 aa, Homo sapiens
CVKDRGGYDDGGLDYW

SEQ ID NO: 64100 - protein, 13 aa, Homo sapiens
CATVGMNYQTDYW

SEQ ID NO: 64101 - protein, 18 aa, Homo sapiens
CVRAAYDSNGFYYYFDLW

SEQ ID NO: 64102 - protein, 14 aa, Homo sapiens
CVRGPVFPYPFDIW

SEQ ID NO: 64103 - protein, 18 aa, Homo sapiens
CAKDWAGRPPNWGDFDHW

SEQ ID NO: 64104 - protein, 22 aa, Homo sapiens
CARRSRVLFGSLPPMEYYMDVW

SEQ ID NO: 64105 - protein, 13 aa, Homo sapiens
CASSFWSGPLDYW

SEQ ID NO: 64106 - protein, 22 aa, Homo sapiens
CARTDPQYSSSWSKPVGYFDLW

SEQ ID NO: 64107 - protein, 22 aa, Homo sapiens
CARDPGSRLKKTTRGLGTFDPW

SEQ ID NO: 64108 - protein, 16 aa, Homo sapiens
CARAEGELLLNRFDYW

SEQ ID NO: 64109 - protein, 24 aa, Homo sapiens
CARGGWRSSNYRAVGYYYYYMDVW

SEQ ID NO: 64110 - protein, 18 aa, Homo sapiens
CVKDKGSGSSYILYFDYW

SEQ ID NO: 64111 - protein, 14 aa, Homo sapiens
CARLGDYGDYVDSW

SEQ ID NO: 64112 - protein, 13 aa, Homo sapiens
CATESWRPTFGYW

SEQ ID NO: 64113 - protein, 20 aa, Homo sapiens
CARRPPRDISGWYIDAFDMW

SEQ ID NO: 64114 - protein, 15 aa, Homo sapiens
CAKESSGATYYFDYW

SEQ ID NO: 64115 - protein, 20 aa, Homo sapiens
CARGSAYSNFWSGSDAFDIW

SEQ ID NO: 64116 - protein, 27 aa, Homo sapiens
CAKEDRPGWELRGFHLEVLRGGPFDYW

SEQ ID NO: 64117 - protein, 22 aa, Homo sapiens
CANIDGVYCGSTGCYPYYFDYW

SEQ ID NO: 64118 - protein, 14 aa, Homo sapiens
CARSLVPAANPDYW

SEQ ID NO: 64119 - protein, 19 aa, Homo sapiens
CARHGLVDPGMVLYALDVW

SEQ ID NO: 64120 - protein, 20 aa, Homo sapiens
CAKDQGAIGHVWAPDAFDIW

SEQ ID NO: 64121 - protein, 22 aa, Homo sapiens
CAKVTGITIFSPWDYYYGMDVW

SEQ ID NO: 64122 - protein, 23 aa, Homo sapiens
CAREDYFTMPQRKIYYYYGMDVW

SEQ ID NO: 64123 - protein, 18 aa, Homo sapiens
CASHPDPLGATTVRFDYW

SEQ ID NO: 64124 - protein, 19 aa, Homo sapiens
CARDRVSEDDFDSRWFDPW

SEQ ID NO: 64125 - protein, 15 aa, Homo sapiens
CAKAQNRGWGPFDYW

SEQ ID NO: 64126 - protein, 19 aa, Homo sapiens
CARGYCSGGSCYFSAFDIW

SEQ ID NO: 64127 - protein, 20 aa, Homo sapiens
CAHSKRPAAIPSHTNWFDPW

SEQ ID NO: 64128 - protein, 22 aa, Homo sapiens
CATVEDRHYDFWSGYGSYFDYW

SEQ ID NO: 64129 - protein, 20 aa, Homo sapiens
CAINGGYCSSTSCYSLFDNW

SEQ ID NO: 64130 - protein, 19 aa, Homo sapiens
CARVGPGVTTYYYYGMDVW

SEQ ID NO: 64131 - protein, 19 aa, Homo sapiens
CAKVRYCATLNCRSPLDYW

SEQ ID NO: 64132 - protein, 17 aa, Homo sapiens
CAKDVYIAYYYNGMDVW

SEQ ID NO: 64133 - protein, 14 aa, Homo sapiens
CVRAMSFVGYGDFW

SEQ ID NO: 64134 - protein, 21 aa, Homo sapiens
CARVGTPTGTTNYYYYGMDVW

SEQ ID NO: 64135 - protein, 24 aa, Homo sapiens
CARVAEIVVVVAAIPYYYYYMDVW

SEQ ID NO: 64136 - protein, 16 aa, Homo sapiens
CAMRQCGVGSCYLGYW

SEQ ID NO: 64137 - protein, 20 aa, Homo sapiens
CAGQLSVVVPVPIPLFFDPW

SEQ ID NO: 64138 - protein, 15 aa, Homo sapiens
CVKSTSGWSPPFDYW

SEQ ID NO: 64139 - protein, 18 aa, Homo sapiens
CAKDVRYGISSKGIFDDW

SEQ ID NO: 64140 - protein, 23 aa, Homo sapiens
CARDQRHDFWSGYYWGWNYFDYW

SEQ ID NO: 64141 - protein, 24 aa, Homo sapiens
CAKEDLWPGADCGGDCYSVPADYW

SEQ ID NO: 64142 - protein, 23 aa, Homo sapiens
CARGGWRRAAPTSNYYYYYMDVW

SEQ ID NO: 64143 - protein, 19 aa, Homo sapiens
CARVIGTGVVLGPVDFDYW

SEQ ID NO: 64144 - protein, 19 aa, Homo sapiens
CARVNRAAATLHIHWFDPW

SEQ ID NO: 64145 - protein, 22 aa, Homo sapiens
CARDSQNYDFWSGYSADAFDIW

SEQ ID NO: 64146 - protein, 25 aa, Homo sapiens
CARGIKLTTVTTSEVGYYYYGMDVW

SEQ ID NO: 64147 - protein, 18 aa, Homo sapiens
CAAPGIAAYISELYFDYW

SEQ ID NO: 64148 - protein, 15 aa, Homo sapiens
CAKKNPSSGWFFDYW

SEQ ID NO: 64149 - protein, 18 aa, Homo sapiens
CARDIILVPAAIPQIDYW

SEQ ID NO: 64150 - protein, 21 aa, Homo sapiens
CARLNSDDFWDGYYAYYFDYW

SEQ ID NO: 64151 - protein, 22 aa, Homo sapiens
CAKDLMYDTWSNYYTGDAFDMW

SEQ ID NO: 64152 - protein, 20 aa, Homo sapiens
CAKDSKQWLGNYYYYGMDVW

SEQ ID NO: 64153 - protein, 24 aa, Homo sapiens
CARLAGYCTNGVCFGDYYYYMDVW

SEQ ID NO: 64154 - protein, 16 aa, Homo sapiens
CAHRLPTSTWYAFDFW

SEQ ID NO: 64155 - protein, 26 aa, Homo sapiens
CARDAHPLRYFDWFPGRYYYYGMDVW

SEQ ID NO: 64156 - protein, 16 aa, Homo sapiens
CASSSTPGVPAAIDYW

SEQ ID NO: 64157 - protein, 21 aa, Homo sapiens
CARVGPVGNDFWSGYVWFDPW

SEQ ID NO: 64158 - protein, 18 aa, Homo sapiens
CARCCYYDSSGYVPFDSW

SEQ ID NO: 64159 - protein, 17 aa, Homo sapiens
CASPPTTVVKTEYFQHW

SEQ ID NO: 64160 - protein, 16 aa, Homo sapiens
CARDSGMTEYGGFDFW

SEQ ID NO: 64161 - protein, 13 aa, Homo sapiens
CARFLVDEGFDLW

SEQ ID NO: 64162 - protein, 19 aa, Homo sapiens
CARDRRGSGSYLPYYFDYW

SEQ ID NO: 64163 - protein, 22 aa, Homo sapiens
CAKTNRWVGGYYHPNLHYFDSW

SEQ ID NO: 64164 - protein, 21 aa, Homo sapiens
CAREAEKAVAYDYYYYYMDVW

SEQ ID NO: 64165 - protein, 18 aa, Homo sapiens
CARDRWAVTDSHDAFDIW

SEQ ID NO: 64166 - protein, 18 aa, Homo sapiens
CARGVGDWAFLYSSFQYW

SEQ ID NO: 64167 - protein, 19 aa, Homo sapiens
CARGIVAIPIPPANHFDIW

SEQ ID NO: 64168 - protein, 19 aa, Homo sapiens
CTKDRGIRILMLTATFDYW

SEQ ID NO: 64169 - protein, 16 aa, Homo sapiens
CARGTVGNYGSFFDHW

SEQ ID NO: 64170 - protein, 14 aa, Homo sapiens
CAHTLGYQAPPDYW

SEQ ID NO: 64171 - protein, 19 aa, Homo sapiens
CAKPLKTPVTGTYDGFDHW

SEQ ID NO: 64172 - protein, 21 aa, Homo sapiens
CARAPFIAVAGYYYYYGMDVW

SEQ ID NO: 64173 - protein, 23 aa, Homo sapiens
CATFADCGGGCYSFHYYYGMDVW

SEQ ID NO: 64174 - protein, 21 aa, Homo sapiens
CATDRGSGPTPPYYYDDMDVW

SEQ ID NO: 64175 - protein, 11 aa, Homo sapiens
CLHHNSYSWTF

SEQ ID NO: 64176 - protein, 15 aa, Homo sapiens
CVRDPEPVVEDLDYW

SEQ ID NO: 64177 - protein, 22 aa, Homo sapiens
CARVVPTRRYDFWSGINWFDPW

SEQ ID NO: 64178 - protein, 22 aa, Homo sapiens
CATDTSSSSGLGYYYYYYMDVW

SEQ ID NO: 64179 - protein, 25 aa, Homo sapiens
CARGRPGTIVVVIASLHYYYYMDVW

SEQ ID NO: 64180 - protein, 16 aa, Homo sapiens
CAVELRRNYYYGMDVW

SEQ ID NO: 64181 - protein, 15 aa, Homo sapiens
CARGSYRHEMIHDYW

SEQ ID NO: 64182 - protein, 21 aa, Homo sapiens
CAKGGWYGGTRGAWERHFDYW

SEQ ID NO: 64183 - protein, 21 aa, Homo sapiens
CASGDDYYDSSGAPLWAFDIW

SEQ ID NO: 64184 - protein, 18 aa, Homo sapiens
CARDLGTYGDYVGAFDIW

SEQ ID NO: 64185 - protein, 21 aa, Homo sapiens
CARSPSSPYSSGEIEYYFDYW

SEQ ID NO: 64186 - protein, 20 aa, Homo sapiens
CAKGPGVGEYDSKENYFDYW

SEQ ID NO: 64187 - protein, 13 aa, Homo sapiens
CATSESNVYPTYW

SEQ ID NO: 64188 - protein, 20 aa, Homo sapiens
CARGHVLQWSEESSVAFDIW

SEQ ID NO: 64189 - protein, 15 aa, Homo sapiens
CALESLINGASLDYW

SEQ ID NO: 64190 - protein, 24 aa, Homo sapiens
CARRGPQPGIAAAGTLMPDAFDIW

SEQ ID NO: 64191 - protein, 21 aa, Homo sapiens
CARGGITISGVLPYYYYMDVW

SEQ ID NO: 64192 - protein, 16 aa, Homo sapiens
CALIVGAANTLLFDFW

SEQ ID NO: 64193 - protein, 15 aa, Homo sapiens
CARALHFWSGPFDCW

SEQ ID NO: 64194 - protein, 28 aa, Homo sapiens
CARAPDFWSGYYRRGPFPYYYYYYMDVW

SEQ ID NO: 64195 - protein, 18 aa, Homo sapiens
CARALPTRAPYRDAFDIW

SEQ ID NO: 64196 - protein, 13 aa, Homo sapiens
CARQPGRVPFDIW

SEQ ID NO: 64197 - protein, 19 aa, Homo sapiens
CAMQGYCTTTSCRGYHDYW

SEQ ID NO: 64198 - protein, 20 aa, Homo sapiens
CAKDWSTSYRYYYYYGMDVW

SEQ ID NO: 64199 - protein, 20 aa, Homo sapiens
CARGAQYQLLNDDYYYMDVW

SEQ ID NO: 64200 - protein, 21 aa, Homo sapiens
CAREGGYSYGSVRYYYGMDVW

SEQ ID NO: 64201 - protein, 18 aa, Homo sapiens
CHRDLGSGNNHRGGWDYW

SEQ ID NO: 64202 - protein, 24 aa, Homo sapiens
CAINDYSNYFGRVHYYYSYVMDVW

SEQ ID NO: 64203 - protein, 21 aa, Homo sapiens
CARDSSGSYYQSYYYYGMDVW

SEQ ID NO: 64204 - protein, 20 aa, Homo sapiens
CARDYDPRGGPYYYYGMDVW

SEQ ID NO: 64205 - protein, 17 aa, Homo sapiens
CAVYPAFWSGYYAFDYW

SEQ ID NO: 64206 - protein, 22 aa, Homo sapiens
CARDQTTVTIAPHSYYYGMDVW

SEQ ID NO: 64207 - protein, 18 aa, Homo sapiens
CAKDRRVTLLMGDAFDIW

SEQ ID NO: 64208 - protein, 19 aa, Homo sapiens
CARVCHLTTDVLPNWFDPW

SEQ ID NO: 64209 - protein, 20 aa, Homo sapiens
CATPSLLLRFLEWLPYFDYW

SEQ ID NO: 64210 - protein, 15 aa, Homo sapiens
CAREGAPVTTHYDYW

SEQ ID NO: 64211 - protein, 19 aa, Homo sapiens
CARSSGFGEPYYYYGMDVW

SEQ ID NO: 64212 - protein, 26 aa, Homo sapiens
CARAHPIREITIFGVVPRRGHWFDPW

SEQ ID NO: 64213 - protein, 24 aa, Homo sapiens
CAKDSAYYYDSSGYSYYYYGMDVW

SEQ ID NO: 64214 - protein, 20 aa, Homo sapiens
CARDFSEADYYDSSALGDYW

SEQ ID NO: 64215 - protein, 11 aa, Homo sapiens
CHQSSILPYTF

SEQ ID NO: 64216 - protein, 31 aa, Homo sapiens
CARVTGYRDYYDSTGYYPKTATYYYFAMDVW

SEQ ID NO: 64217 - protein, 23 aa, Homo sapiens
CARDLRTLTTRLSPYYYYGMDVW

SEQ ID NO: 64218 - protein, 16 aa, Homo sapiens
CASTNDYSNYVREDYW

SEQ ID NO: 64219 - protein, 15 aa, Homo sapiens
CATPGAVGHRGFDYW

SEQ ID NO: 64220 - protein, 16 aa, Homo sapiens
CARPMRGLFLEAIDYW

SEQ ID NO: 64221 - protein, 14 aa, Homo sapiens
CAHRRALYDAFDIW

SEQ ID NO: 64222 - protein, 14 aa, Homo sapiens
CARLGYYYGHTDYW

SEQ ID NO: 64223 - protein, 25 aa, Homo sapiens
CARVPSITIFGVVIPNYYYYYMDVW

SEQ ID NO: 64224 - protein, 22 aa, Homo sapiens
CTRDRADYYDFWSGYPNWFDPW

SEQ ID NO: 64225 - protein, 20 aa, Homo sapiens
CARDGVAVAADYYYYGMDVW

SEQ ID NO: 64226 - protein, 17 aa, Homo sapiens
CARARSPKQQLVPFDYW

SEQ ID NO: 64227 - protein, 20 aa, Homo sapiens
CARSFGLNPDHGGNSEFDYW

SEQ ID NO: 64228 - protein, 17 aa, Homo sapiens
CAKLRDYGDYNDALDFW

SEQ ID NO: 64229 - protein, 20 aa, Homo sapiens
CARGAQPAAATEGRDAFDIW

SEQ ID NO: 64230 - protein, 21 aa, Homo sapiens
CARDNLYCSGGSCYYYGMDVW

SEQ ID NO: 64231 - protein, 24 aa, Homo sapiens
CARERARKIFGVVNYYYYYYMDVW

SEQ ID NO: 64232 - protein, 18 aa, Homo sapiens
CARAGWVGAVAAHAIDYW

SEQ ID NO: 64233 - protein, 19 aa, Homo sapiens
CAKAGLSGGGYWRWSFDYW

SEQ ID NO: 64234 - protein, 15 aa, Homo sapiens
CAKASSNWREPFDYW

SEQ ID NO: 64235 - protein, 22 aa, Homo sapiens
CARGFDIVVVPDVDDYSAMDVW

SEQ ID NO: 64236 - protein, 17 aa, Homo sapiens
CASAVYSNYVKDAFDIW

SEQ ID NO: 64237 - protein, 16 aa, Homo sapiens
CAREVEQQLVMWFDYW

SEQ ID NO: 64238 - protein, 19 aa, Homo sapiens
CARFKSYGSGSYLRYFDLW

SEQ ID NO: 64239 - protein, 17 aa, Homo sapiens
CARHTVRGYYPYYFDYW

SEQ ID NO: 64240 - protein, 14 aa, Homo sapiens
CVYCSGTICSSDYW

SEQ ID NO: 64241 - protein, 17 aa, Homo sapiens
CARGPIVLAANWYFDLW

SEQ ID NO: 64242 - protein, 17 aa, Homo sapiens
CAGGYTYGYSNWYFDPW

SEQ ID NO: 64243 - protein, 23 aa, Homo sapiens
CTRDLPRITMKMVRSKGEAYDVW

SEQ ID NO: 64244 - protein, 21 aa, Homo sapiens
CASREISITIFGVVNRAFDIW

SEQ ID NO: 64245 - protein, 17 aa, Homo sapiens
CARPSRDYDFLTGYDYW

SEQ ID NO: 64246 - protein, 24 aa, Homo sapiens
CARDHFDRILPGYSAYYYYGVDVW

SEQ ID NO: 64247 - protein, 19 aa, Homo sapiens
CAKGEALSLGDKGDYFDSW

SEQ ID NO: 64248 - protein, 18 aa, Homo sapiens
CAKDMSAMVVAATIFDYW

SEQ ID NO: 64249 - protein, 23 aa, Homo sapiens
CARDPYCSSTSCYDHMAEYFQHW

SEQ ID NO: 64250 - protein, 17 aa, Homo sapiens
CVKDARDFWSAHYFDDW

SEQ ID NO: 64251 - protein, 18 aa, Homo sapiens
CARQGAVVVGPMGFLDYW

SEQ ID NO: 64252 - protein, 15 aa, Homo sapiens
CARIRRAAGMTIDYW

SEQ ID NO: 64253 - protein, 17 aa, Homo sapiens
CASQSVLLTTTDAFDIW

SEQ ID NO: 64254 - protein, 15 aa, Homo sapiens
CARRVLQGERVFDYW

SEQ ID NO: 64255 - protein, 24 aa, Homo sapiens
CAKDSYIVVVPAATNYYYYGMDVW

SEQ ID NO: 64256 - protein, 13 aa, Homo sapiens [sequence omitted]

SEQ ID NO: 64257 - protein, 14 aa, Homo sapiens
CANFGGNSGFVDYW

SEQ ID NO: 64258 - protein, 17 aa, Homo sapiens
CAKEGLSDYWNGYYDYW

SEQ ID NO: 64259 - protein, 23 aa, Homo sapiens
CAHRPVWDSSGYYYVGPYYFDYW

SEQ ID NO: 64260 - protein, 17 aa, Homo sapiens
CARSRIVVVTAADFDYW

SEQ ID NO: 64261 - protein, 25 aa, Homo sapiens
CARLNQLLWFGELTNPYYYYGMDVW

SEQ ID NO: 64262 - protein, 17 aa, Homo sapiens
CAKDIREWYYGSAVDVW

SEQ ID NO: 64263 - protein, 20 aa, Homo sapiens
CAREKIYNLRLGELSSLDYW

SEQ ID NO: 64264 - protein, 19 aa, Homo sapiens
CARENTLYSGSQYKWLDPW

SEQ ID NO: 64265 - protein, 18 aa, Homo sapiens
CARGPGVFGVVIIAFDYW

SEQ ID NO: 64266 - protein, 16 aa, Homo sapiens
CAHNDVWGSYRLFDYW

SEQ ID NO: 64267 - protein, 22 aa, Homo sapiens
CARECDSSGYYYDGEGDYFDYW

SEQ ID NO: 64268 - protein, 24 aa, Homo sapiens
CARDPSMVRGVIIIGYYYYYMDVW

SEQ ID NO: 64269 - protein, 19 aa, Homo sapiens
CAHSTNNGSYYKRWYFDHW

SEQ ID NO: 64270 - protein, 15 aa, Homo sapiens
CAREYGDENWYFDLW

SEQ ID NO: 64271 - protein, 13 aa, Homo sapiens
CQRSYVTPRLFTF

SEQ ID NO: 64272 - protein, 16 aa, Homo sapiens
CAKDRIVSTIWYFDYW

SEQ ID NO: 64273 - protein, 17 aa, Homo sapiens
CAKANAGSYIGEAFDIW

SEQ ID NO: 64274 - protein, 27 aa, Homo sapiens
CARGKGIDYDILTTLGLYYYYYYMDVW

SEQ ID NO: 64275 - protein, 23 aa, Homo sapiens
CARVPMYEYESSGYYWGYHLDYW

SEQ ID NO: 64276 - protein, 29 aa, Homo sapiens
CARSPLPRYSGSYFFRKTSEKMRRNFDYW

SEQ ID NO: 64277 - protein, 20 aa, Homo sapiens
CARGFSTIFGVVIEYYFDYW

SEQ ID NO: 64278 - protein, 17 aa, Homo sapiens
CARGLYGDYSLYYFDYW

SEQ ID NO: 64279 - protein, 14 aa, Homo sapiens
CAKLYGDDSYFDYW

SEQ ID NO: 64280 - protein, 21 aa, Homo sapiens
CAIQLYSSYWSRLNLGNGDYW

SEQ ID NO: 64281 - protein, 23 aa, Homo sapiens
CAYVATYYDERTIYNERWYSDYW

SEQ ID NO: 64282 - protein, 17 aa, Homo sapiens
CAKSPEGLFAERGFDYW

SEQ ID NO: 64283 - protein, 17 aa, Homo sapiens
CAKDYYDSSGYGWFDPW

SEQ ID NO: 64284 - protein, 14 aa, Homo sapiens
CASFSDGGRGFDPW

SEQ ID NO: 64285 - protein, 13 aa, Homo sapiens
CARRGYSYEFDSW

SEQ ID NO: 64286 - protein, 20 aa, Homo sapiens
CASRPTPDFWSGYYPHFDYW

SEQ ID NO: 64287 - protein, 22 aa, Homo sapiens
CARAQYCSSTRCNSLGYYMDVW

SEQ ID NO: 64288 - protein, 19 aa, Homo sapiens
CARRSFFGSGSWRGAFDIW

SEQ ID NO: 64289 - protein, 18 aa, Homo sapiens
CATTRLAGQLVPAAFDIW

SEQ ID NO: 64290 - protein, 22 aa, Homo sapiens
CARAYYDFWSGQYGPTYYFDYW

SEQ ID NO: 64291 - protein, 21 aa, Homo sapiens
CARDLRFTIFGVVIIDYFDYW

SEQ ID NO: 64292 - protein, 17 aa, Homo sapiens
CARDRYSLVPAAFFDYW

SEQ ID NO: 64293 - protein, 19 aa, Homo sapiens
CARETARWRHLWLRYFDYW

SEQ ID NO: 64294 - protein, 18 aa, Homo sapiens
CARTGPTMVRGVPYFDYW

SEQ ID NO: 64295 - protein, 18 aa, Homo sapiens
CARHAAAARQPLGYFDYW

SEQ ID NO: 64296 - protein, 17 aa, Homo sapiens
CARDGGDGYSYGQFDYW

SEQ ID NO: 64297 - protein, 17 aa, Homo sapiens
CARVNHSGYDYFYFDYW

SEQ ID NO: 64298 - protein, 18 aa, Homo sapiens
CARGLDYYDSGQDGMDVW

SEQ ID NO: 64299 - protein, 24 aa, Homo sapiens
CARTEGYDFWSGLRYYYYYYMDVW

SEQ ID NO: 64300 - protein, 18 aa, Homo sapiens
CAKGGSGWQIYYYGMDVW

SEQ ID NO: 64301 - protein, 24 aa, Homo sapiens
CTRGPRDYYDSSGYYYGEYYFDYW

SEQ ID NO: 64302 - protein, 15 aa, Homo sapiens
CAHSGVPHYVPFDYW

SEQ ID NO: 64303 - protein, 24 aa, Homo sapiens
CARHNYCSSTSCHRYPYYYYMDVW

SEQ ID NO: 64304 - protein, 22 aa, Homo sapiens
CARGDKRITMVRAYYYYGMDVW

SEQ ID NO: 64305 - protein, 17 aa, Homo sapiens
CARSDAPYYYYYCMDVW

SEQ ID NO: 64306 - protein, 19 aa, Homo sapiens
CAKGYYYGSGTLLDAFDVW

SEQ ID NO: 64307 - protein, 17 aa, Homo sapiens
CARDSTMIVFTYAFDIW

SEQ ID NO: 64308 - protein, 16 aa, Homo sapiens
CVKDVAATGRGYFDYW

SEQ ID NO: 64309 - protein, 17 aa, Homo sapiens
CARDNFEGFWSGQNDYW

SEQ ID NO: 64310 - protein, 18 aa, Homo sapiens
CAKDQGGDIVVGGYFDLW

SEQ ID NO: 64311 - protein, 19 aa, Homo sapiens
CARSNVDTAMDRRYYFDYW

SEQ ID NO: 64312 - protein, 16 aa, Homo sapiens
CARMSAGSSLMGFDYW

SEQ ID NO: 64313 - protein, 19 aa, Homo sapiens
CAKDADSSGWYAHWYFDLW

SEQ ID NO: 64314 - protein, 22 aa, Homo sapiens
CARRVVGATHRIYYYYYGMDVW

SEQ ID NO: 64315 - protein, 24 aa, Homo sapiens
CARDREGFSYDYSPDYYYYGMDVW

SEQ ID NO: 64316 - protein, 15 aa, Homo sapiens
CASPSSWNHDAFDIW

SEQ ID NO: 64317 - protein, 15 aa, Homo sapiens
CAHRRRGSYNSFDYW

SEQ ID NO: 64318 - protein, 21 aa, Homo sapiens
CASERMYSSSWWAQGYCFDYW

SEQ ID NO: 64319 - protein, 23 aa, Homo sapiens
CVRDSQLLWFGELLYGANYMDVW

SEQ ID NO: 64320 - protein, 18 aa, Homo sapiens
CARDAFVGATMHTGFDYW

SEQ ID NO: 64321 - protein, 19 aa, Homo sapiens
CALPIFLSGYYQGGILDYW

SEQ ID NO: 64322 - protein, 16 aa, Homo sapiens
CAKDVGGWFKYSFDYW

SEQ ID NO: 64323 - protein, 29 aa, Homo sapiens
CARGRGEYYDFWSGLSGVTRPRSYYFDYW

SEQ ID NO: 64324 - protein, 22 aa, Homo sapiens
CARTRTTGSYNSGWYNFGSDYW

SEQ ID NO: 64325 - protein, 20 aa, Homo sapiens
CAKDYFLAIFGVVNDYFDYW

SEQ ID NO: 64326 - protein, 17 aa, Homo sapiens
CARDSLRYGGNEADDYW

SEQ ID NO: 64327 - protein, 23 aa, Homo sapiens
CARARKQVVLSNFRYAYNYMDVW

SEQ ID NO: 64328 - protein, 17 aa, Homo sapiens
CAKKPRGGYSPYYFDYW

SEQ ID NO: 64329 - protein, 19 aa, Homo sapiens
CVKDLEVPAAQNYDALDVW

SEQ ID NO: 64330 - protein, 24 aa, Homo sapiens
CARLDESVEQLGRYGPYYYGMDVW

SEQ ID NO: 64331 - protein, 17 aa, Homo sapiens
CARNLWELLPHWYFDLW

SEQ ID NO: 64332 - protein, 23 aa, Homo sapiens
CARETRPFYYDISLPPDWYFDLW

SEQ ID NO: 64333 - protein, 18 aa, Homo sapiens
CVRDGVEAAGSYWSFDLW

SEQ ID NO: 64334 - protein, 24 aa, Homo sapiens
CARANHPETIFGVVIIPVRYFDYW

SEQ ID NO: 64335 - protein, 13 aa, Homo sapiens
CANDRDYGSFDHW

SEQ ID NO: 64336 - protein, 19 aa, Homo sapiens
CANDCRLFLMGADYHFDYW

SEQ ID NO: 64337 - protein, 23 aa, Homo sapiens
CAKDSLPPYCSGGDCYSRAFHVW

SEQ ID NO: 64338 - protein, 15 aa, Homo sapiens
CTRFHGSYLVAFDIW

SEQ ID NO: 64339 - protein, 21 aa, Homo sapiens
CARAPTITMVRGAYYYYMDVW

SEQ ID NO: 64340 - protein, 20 aa, Homo sapiens
CARGGPMGAPPYYYYYMDVW

SEQ ID NO: 64341 - protein, 19 aa, Homo sapiens
CATDRADFWSGIAEYFQHW

SEQ ID NO: 64342 - protein, 16 aa, Homo sapiens
CARHESGRYYRYFQHW

SEQ ID NO: 64343 - protein, 18 aa, Homo sapiens
CATSRGTLIRGVLYFDFW

SEQ ID NO: 64344 - protein, 21 aa, Homo sapiens
CARDRLNYYDSSVSADHFDYW

SEQ ID NO: 64345 - protein, 24 aa, Homo sapiens
CAREVDIVVVPAAIPLYYYGMDVW

SEQ ID NO: 64346 - protein, 24 aa, Homo sapiens
CARHSLTSITIFGVVTASGYFDLW

SEQ ID NO: 64347 - protein, 26 aa, Homo sapiens
CATPEGSTWGDRIQYPGSSGYFFDYW

SEQ ID NO: 64348 - protein, 14 aa, Homo sapiens
CARLGPSGWYSEYW

SEQ ID NO: 64349 - protein, 14 aa, Homo sapiens
CSRVNTTYWYFDLW

SEQ ID NO: 64350 - protein, 15 aa, Homo sapiens
CVYDSSGYYGYFDYW

SEQ ID NO: 64351 - protein, 18 aa, Homo sapiens
CARDHSGLAADYNWFDPW

SEQ ID NO: 64352 - protein, 20 aa, Homo sapiens
CARDHDSSGWYDQQHYFDYW

SEQ ID NO: 64353 - protein, 20 aa, Homo sapiens
CARELISRPLQYYNYYMDVW

SEQ ID NO: 64354 - protein, 22 aa, Homo sapiens
CARGSAIFGVVSTETYWYFDVW

SEQ ID NO: 64355 - protein, 14 aa, Homo sapiens
CARMKCLTRTFDIW

SEQ ID NO: 64356 - protein, 21 aa, Homo sapiens
CARNYDFYGTAAAPTNWFDPW

SEQ ID NO: 64357 - protein, 32 aa, Homo sapiens
CARERSQNEGQIGYYDFWSGYGRYYYYYMDVW

SEQ ID NO: 64358 - protein, 17 aa, Homo sapiens
CAMVGVVPAANQLIDYW

SEQ ID NO: 64359 - protein, 21 aa, Homo sapiens
CTSEFRIEEYYYDSSGGPDYW

SEQ ID NO: 64360 - protein, 15 aa, Homo sapiens
CARARETGYYLFDYW

SEQ ID NO: 64361 - protein, 14 aa, Homo sapiens
CACIAARPWYFDYW

SEQ ID NO: 64362 - protein, 19 aa, Homo sapiens
CARDWTYSSSGYNWYFDLW

SEQ ID NO: 64363 - protein, 17 aa, Homo sapiens
CATSFFGSYYGDWFDPW

SEQ ID NO: 64364 - protein, 21 aa, Homo sapiens
CARAIVVVPAAITWGDWFDPW

SEQ ID NO: 64365 - protein, 18 aa, Homo sapiens
CARADGEYEYYFYAMDVW

SEQ ID NO: 64366 - protein, 16 aa, Homo sapiens
CARDRGSHSWPQFDPW

SEQ ID NO: 64367 - protein, 18 aa, Homo sapiens
CARGSRDSFGYLMQFDYW

SEQ ID NO: 64368 - protein, 23 aa, Homo sapiens
CATRGGYCSGGSCYFYYYYMDVW

SEQ ID NO: 64369 - protein, 22 aa, Homo sapiens
CARGPPGYCSSTSCPLYYMDVW

SEQ ID NO: 64370 - protein, 18 aa, Homo sapiens
CTRVDEVAAMENNWFDPW

SEQ ID NO: 64371 - protein, 21 aa, Homo sapiens
CTPQLRTGYSSGWYPYYFDYW

SEQ ID NO: 64372 - protein, 16 aa, Homo sapiens
CASAQRGSWPDAFDIW

SEQ ID NO: 64373 - protein, 20 aa, Homo sapiens
CARGRCGSSRCYYAYYFDSW

SEQ ID NO: 64374 - protein, 14 aa, Homo sapiens
CARGGWYEDYLQYW

SEQ ID NO: 64375 - protein, 18 aa, Homo sapiens
CAGEAVAFRLTYWYFDLW

SEQ ID NO: 64376 - protein, 17 aa, Homo sapiens
CARASASGWINNPFDYW

SEQ ID NO: 64377 - protein, 23 aa, Homo sapiens
CAKDPREDDFWSGYQSWGWFGPW

SEQ ID NO: 64378 - protein, 18 aa, Homo sapiens
CARDLEHSDGFSFAFDYW

SEQ ID NO: 64379 - protein, 29 aa, Homo sapiens
CARDGEVRATIRREGVDQFYYYYFGMDVW

SEQ ID NO: 64380 - protein, 16 aa, Homo sapiens
CVKDIGWEVGGAFDVW

SEQ ID NO: 64381 - protein, 22 aa, Homo sapiens
CARERGVNTIFGVVSGIGFDYW

SEQ ID NO: 64382 - protein, 17 aa, Homo sapiens
CAKDRVGTTCCRWFDLW

SEQ ID NO: 64383 - protein, 20 aa, Homo sapiens
CARGGVEVGATYYYYGMDVW

SEQ ID NO: 64384 - protein, 17 aa, Homo sapiens
CARTYIWNSLTYYFDYW

SEQ ID NO: 64385 - protein, 15 aa, Homo sapiens
CVHSEWDRLLILDYW

SEQ ID NO: 64386 - protein, 19 aa, Homo sapiens
CARLPAYCGGDCSTVFDYW

SEQ ID NO: 64387 - protein, 19 aa, Homo sapiens
CAKDPEGGITGTTGYFDYW

SEQ ID NO: 64388 - protein, 18 aa, Homo sapiens
CARAGFGDDSSGYFFDYW

SEQ ID NO: 64389 - protein, 26 aa, Homo sapiens
CAREVPVTIFGVVIGPSDYYYGMDVW

SEQ ID NO: 64390 - protein, 19 aa, Homo sapiens
CATCGSGSFYNSLYFFDYW

SEQ ID NO: 64391 - protein, 14 aa, Homo sapiens
CAVEKWGTNWFDFW

SEQ ID NO: 64392 - protein, 31 aa, Homo sapiens
CMQALQTPPTFGPGTKVDIKRKQALQTPPTF

SEQ ID NO: 64393 - protein, 14 aa, Homo sapiens
CCSYRSSSTLHVVF

SEQ ID NO: 64394 - protein, 14 aa, Homo sapiens
CALNYGGIREFDYW

SEQ ID NO: 64395 - protein, 18 aa, Homo sapiens
CAKDYVHSGSYYRTFDYW

SEQ ID NO: 64396 - protein, 18 aa, Homo sapiens
CARALNWALFHNSAFDIW

SEQ ID NO: 64397 - protein, 21 aa, Homo sapiens
CARDFPSSRYSSAWSDAFDIW

SEQ ID NO: 64398 - protein, 20 aa, Homo sapiens
CARVGWAYYYDSSGLFFDYW

SEQ ID NO: 64399 - protein, 17 aa, Homo sapiens
CAKDRGLIHTNYYMDVW

SEQ ID NO: 64400 - protein, 15 aa, Homo sapiens
CALRQGASYFYFDFW

SEQ ID NO: 64401 - protein, 19 aa, Homo sapiens
CARTNYDILSDYYTEFDYW

SEQ ID NO: 64402 - protein, 23 aa, Homo sapiens
CANEPNDPGVIMSGSYYAAFDIW

SEQ ID NO: 64403 - protein, 20 aa, Homo sapiens
CATPTRGSYLGYYYYYMDVW

SEQ ID NO: 64404 - protein, 17 aa, Homo sapiens
CAAYYDSSGLQEYFDYW

SEQ ID NO: 64405 - protein, 15 aa, Homo sapiens
CARELPGAGSRFEYW

SEQ ID NO: 64406 - protein, 22 aa, Homo sapiens
CARDGPVPAAQKIYYYYYMDVW

SEQ ID NO: 64407 - protein, 17 aa, Homo sapiens
CARDGAVAGYRVAFDIW

SEQ ID NO: 64408 - protein, 15 aa, Homo sapiens
CAREDIPYQRPFDYW

SEQ ID NO: 64409 - protein, 18 aa, Homo sapiens
CARAGYYYEPETPNFDYW

SEQ ID NO: 64410 - protein, 17 aa, Homo sapiens
CARGGFLRLPSYYFDYW

SEQ ID NO: 64411 - protein, 19 aa, Homo sapiens
CARRAVGRSGYYQYYFDYW

SEQ ID NO: 64412 - protein, 18 aa, Homo sapiens
CAKALGEQLWLHVYFDYW

SEQ ID NO: 64413 - protein, 18 aa, Homo sapiens
CAKSTWHYVVITAGFDYW

SEQ ID NO: 64414 - protein, 27 aa, Homo sapiens
CALLGGIFGVVMPQPGSPHNINWFDPW

SEQ ID NO: 64415 - protein, 17 aa, Homo sapiens
CARRQMVRGVPSYFDYW

SEQ ID NO: 64416 - protein, 22 aa, Homo sapiens
CARSCTTIRCYSTVTTSAFDMW

SEQ ID NO: 64417 - protein, 13 aa, Homo sapiens
CAVEMATMEADYW

SEQ ID NO: 64418 - protein, 22 aa, Homo sapiens
CAKDPLSGGQSGTYLNWYFDLW

SEQ ID NO: 64419 - protein, 17 aa, Homo sapiens
CARHLSHNWNYPPFDYW

SEQ ID NO: 64420 - protein, 14 aa, Homo sapiens
CVRRSTGDISFDSW

SEQ ID NO: 64421 - protein, 18 aa, Homo sapiens
CARLRSSWYYTTYYFDYW

SEQ ID NO: 64422 - protein, 17 aa, Homo sapiens
CASHYDISTGPKWFDPW

SEQ ID NO: 64423 - protein, 32 aa, Homo sapiens
CALPIYYCARDLSRVDYGALSGYYQGGILDYW

SEQ ID NO: 64424 - protein, 17 aa, Homo sapiens
CARASSPLVVTAPIDYW

SEQ ID NO: 64425 - protein, 18 aa, Homo sapiens
CARLGVTSSSLGDGFDIW

SEQ ID NO: 64426 - protein, 12 aa, Homo sapiens
CMQRIEFPQYTF

SEQ ID NO: 64427 - protein, 14 aa, Homo sapiens
CAREGHYYQSFDFW

SEQ ID NO: 64428 - protein, 14 aa, Homo sapiens
CSSFTSSSTHNYVF

SEQ ID NO: 64429 - protein, 20 aa, Homo sapiens
CARVDYLDSSGYYLGPFDWW

SEQ ID NO: 64430 - protein, 15 aa, Homo sapiens
CARQDAVVIAHFDYW

SEQ ID NO: 64431 - protein, 18 aa, Homo sapiens
CALTIFGVVTPLYYFDYW

SEQ ID NO: 64432 - protein, 19 aa, Homo sapiens
CARSPNNLIVVVPAAVDYW

SEQ ID NO: 64433 - protein, 22 aa, Homo sapiens
CARDNSNTIFGVVIQPTPFDYW

SEQ ID NO: 64434 - protein, 17 aa, Homo sapiens
CARDRGSGWSQNWFDPW

SEQ ID NO: 64435 - protein, 18 aa, Homo sapiens
CAKDTSSGWRSNWYFDLW

SEQ ID NO: 64436 - protein, 24 aa, Homo sapiens
CARRKSRPYYYDSSGYYPDAFDIW

SEQ ID NO: 64437 - protein, 17 aa, Homo sapiens
CAKGGTLGSARNWLDPW

SEQ ID NO: 64438 - protein, 18 aa, Homo sapiens
CAKFGAVAGKPTYAFDIW

SEQ ID NO: 64439 - protein, 16 aa, Homo sapiens
CARADGGNIANYFDYW

SEQ ID NO: 64440 - protein, 14 aa, Homo sapiens
CARESSLGVIFDYW

SEQ ID NO: 64441 - protein, 23 aa, Homo sapiens
CARDRDILTGYYHYYYYYGMDVW

SEQ ID NO: 64442 - protein, 20 aa, Homo sapiens
CARSNVDFWSGYYNLNFDYW

SEQ ID NO: 64443 - protein, 21 aa, Homo sapiens
CAKDQVAAAENYYYYYGMDVW

SEQ ID NO: 64444 - protein, 18 aa, Homo sapiens
CASSRSDYSRYYYGMDVW

SEQ ID NO: 64445 - protein, 19 aa, Homo sapiens
CAKDRYYDFWSGQRSLDYW

SEQ ID NO: 64446 - protein, 20 aa, Homo sapiens
CARDSQAYSSQDYYYGMDVW

SEQ ID NO: 64447 - protein, 21 aa, Homo sapiens
CARGRRVEGWFGELFDYFDYW

SEQ ID NO: 64448 - protein, 17 aa, Homo sapiens
CAKGDADIFKFCYFNSW

SEQ ID NO: 64449 - protein, 21 aa, Homo sapiens
CARRRLSGGRMSLIVGTVDYW

SEQ ID NO: 64450 - protein, 19 aa, Homo sapiens
CARVPHLIRGDDEWYMDVW

SEQ ID NO: 64451 - protein, 23 aa, Homo sapiens
CARGRGVVVVPAAIMSMGHFDYW

SEQ ID NO: 64452 - protein, 19 aa, Homo sapiens
CAKKGRGSLQLWGGEFDYW

SEQ ID NO: 64453 - protein, 15 aa, Homo sapiens
CAKGSCGGDCLPDYW

SEQ ID NO: 64454 - protein, 14 aa, Homo sapiens
CARSSRGGITPDYW

SEQ ID NO: 64455 - protein, 27 aa, Homo sapiens
CARHGPPYCSGGSCYPDLNYYYYIDVW

SEQ ID NO: 64456 - protein, 15 aa, Homo sapiens
CARTRAGQQLAIDYW

SEQ ID NO: 64457 - protein, 17 aa, Homo sapiens
CARDPRGSSSPQYFDYW

SEQ ID NO: 64458 - protein, 20 aa, Homo sapiens
CAKGPTTVTRYYYYYYMDVW

SEQ ID NO: 64459 - protein, 21 aa, Homo sapiens
CARHGRAGTTVSLYSYYMDVW

SEQ ID NO: 64460 - protein, 21 aa, Homo sapiens
CARDRDCSGGDCYSLDGMDVW

SEQ ID NO: 64461 - protein, 19 aa, Homo sapiens
CARGVAARPGGTYDAFDIW

SEQ ID NO: 64462 - protein, 22 aa, Homo sapiens
CATDTRHQVRFLEWLLFAFDIW

SEQ ID NO: 64463 - protein, 18 aa, Homo sapiens
CASPYCSSTSCYTGFDYW

SEQ ID NO: 64464 - protein, 19 aa, Homo sapiens
CARTKYDILTGFYCDLDYW

SEQ ID NO: 64465 - protein, 18 aa, Homo sapiens
CARGTLGVRGVIRWFDPW

SEQ ID NO: 64466 - protein, 16 aa, Homo sapiens
CARGLVSYGDYGIDYW

SEQ ID NO: 64467 - protein, 17 aa, Homo sapiens
CASSWPYYYYYYGVDVW

SEQ ID NO: 64468 - protein, 12 aa, Homo sapiens
CTYGSAFYFEYW

SEQ ID NO: 64469 - protein, 22 aa, Homo sapiens
CAKLSGYYGSGSYYEADAFDIW

SEQ ID NO: 64470 - protein, 22 aa, Homo sapiens
CALSKGGYTYGYGEGSWYFDLW

SEQ ID NO: 64471 - protein, 20 aa, Homo sapiens
CATYYYDILTGYYSGAFDIW

SEQ ID NO: 64472 - protein, 20 aa, Homo sapiens
CASQEGLSSSFYYYYGMDVW

SEQ ID NO: 64473 - protein, 15 aa, Homo sapiens
CARISVVKGVGSDYW

SEQ ID NO: 64474 - protein, 15 aa, Homo sapiens
CVKRSAPFLGAYDVW

SEQ ID NO: 64475 - protein, 14 aa, Homo sapiens
CARQITGLNGFDVW

SEQ ID NO: 64476 - protein, 24 aa, Homo sapiens
CARQRAGYCSSTSCPIGLGWFDPW

SEQ ID NO: 64477 - protein, 18 aa, Homo sapiens
CARRLKYCSGPSCNFDFW

SEQ ID NO: 64478 - protein, 14 aa, Homo sapiens
CATSYSGWYWFDPW

SEQ ID NO: 64479 - protein, 24 aa, Homo sapiens
CARVPRHYYDSSGSVIREYYFDYW

SEQ ID NO: 64480 - protein, 27 aa, Homo sapiens
CARVKEYYDFWSGYYHRPYYYYGMDVW

SEQ ID NO: 64481 - protein, 16 aa, Homo sapiens
CARSSSGSYFGSIDYW

SEQ ID NO: 64482 - protein, 15 aa, Homo sapiens
CARDRQQLVFGFDYW

SEQ ID NO: 64483 - protein, 17 aa, Homo sapiens
CAHRQIAVAGTFTFDYW

SEQ ID NO: 64484 - protein, 15 aa, Homo sapiens
CARNVDSRLDAFDIW

SEQ ID NO: 64485 - protein, 20 aa, Homo sapiens
CVKDHGDGYNIGRGDYFDYW

SEQ ID NO: 64486 - protein, 15 aa, Homo sapiens
CAGGTYGYSFGRDYW

SEQ ID NO: 64487 - protein, 19 aa, Homo sapiens
CAKDIGGGYERLPGAFDIW

SEQ ID NO: 64488 - protein, 27 aa, Homo sapiens
CAKGTSSIPGYSSSFYSLGTEGYFDYW

SEQ ID NO: 64489 - protein, 16 aa, Homo sapiens
CARNGRGVIGIDFDYW

SEQ ID NO: 64490 - protein, 17 aa, Homo sapiens
CARPGYYASGRPAFDSW

SEQ ID NO: 64491 - protein, 17 aa, Homo sapiens
CAKDRYCSGGNCPLDYW

SEQ ID NO: 64492 - protein, 21 aa, Homo sapiens
CARDEGDGGYLMYYYYGMDVW

SEQ ID NO: 64493 - protein, 20 aa, Homo sapiens
CAKDLLSYSPRRFAKGFDYW

SEQ ID NO: 64494 - protein, 20 aa, Homo sapiens
CAKDLDREAYCGGDCYFDYW

SEQ ID NO: 64495 - protein, 14 aa, Homo sapiens
CARALAPESGYDYW

SEQ ID NO: 64496 - protein, 18 aa, Homo sapiens
CAKEPAGEQLVVYYFDYW

SEQ ID NO: 64497 - protein, 17 aa, Homo sapiens
CAKDQGTSGWYPAFDIW

SEQ ID NO: 64498 - protein, 18 aa, Homo sapiens
CARDEWNGSGTSSYFDYW

SEQ ID NO: 64499 - protein, 16 aa, Homo sapiens
CARGDYGFWSGYYHYW

SEQ ID NO: 64500 - protein, 25 aa, Homo sapiens
CARRSGIAAAGVVTAIHYYYGMDVW

SEQ ID NO: 64501 - protein, 19 aa, Homo sapiens
CAKGGFRLRLQVNSWFDPW

SEQ ID NO: 64502 - protein, 21 aa, Homo sapiens
CVRGHRGELWRPSNAVIFDFW

SEQ ID NO: 64503 - protein, 27 aa, Homo sapiens
CAREGLAGTTFLGAPWLWRTGNYFDYW

SEQ ID NO: 64504 - protein, 19 aa, Homo sapiens
CARDLVMGSSGYSDAFDIW

SEQ ID NO: 64505 - protein, 19 aa, Homo sapiens
CAKDRLAAAGLGREYFQHW

SEQ ID NO: 64506 - protein, 18 aa, Homo sapiens
CAGSSGWYTGDVGRIDYW

SEQ ID NO: 64507 - protein, 18 aa, Homo sapiens
CAKDREFGDLLTRCFDQW

SEQ ID NO: 64508 - protein, 23 aa, Homo sapiens
CARDPTGPHFGVGTKYYYGMDVW

SEQ ID NO: 64509 - protein, 17 aa, Homo sapiens
CTNLGSLKGWGNAFDIW

SEQ ID NO: 64510 - protein, 24 aa, Homo sapiens
CAREPVAAAGPPSRPRPVGHFDYW

SEQ ID NO: 64511 - protein, 27 aa, Homo sapiens
CAKDSLAHLGYNDYDWGHHGTGHLDYW

SEQ ID NO: 64512 - protein, 18 aa, Homo sapiens
CAKDRFGYSYGYEWFDPW

SEQ ID NO: 64513 - protein, 13 aa, Homo sapiens
CQQLNSHSLKFTF

SEQ ID NO: 64514 - protein, 15 aa, Homo sapiens
CAKDIKSAWHYFDSW

SEQ ID NO: 64515 - protein, 21 aa, Homo sapiens
CARIYFTMIVVVITGTYFDYW

SEQ ID NO: 64516 - protein, 26 aa, Homo sapiens
CARQVGLRRLGTRESRIAATGHFDYW

SEQ ID NO: 64517 - protein, 13 aa, Homo sapiens
CAALLFRLAFDIW

SEQ ID NO: 64518 - protein, 25 aa, Homo sapiens
CARHGLLKPSLYRYSSSGGVYFDPW

SEQ ID NO: 64519 - protein, 16 aa, Homo sapiens
CARDGYSYGTPGPDYW

SEQ ID NO: 64520 - protein, 17 aa, Homo sapiens
CARRGTLTGRAINFDYW

SEQ ID NO: 64521 - protein, 17 aa, Homo sapiens
CARPMSKWEILPTFDIW

SEQ ID NO: 64522 - protein, 17 aa, Homo sapiens
CTNGFSGYDYVMTFDIW

SEQ ID NO: 64523 - protein, 20 aa, Homo sapiens
CAKVNTYYYDSSGYIWFDPW

SEQ ID NO: 64524 - protein, 18 aa, Homo sapiens
CTKAQYSGYDEVLNFDYW

SEQ ID NO: 64525 - protein, 21 aa, Homo sapiens
CARGGTMVALTYYYYYGMDVW

SEQ ID NO: 64526 - protein, 19 aa, Homo sapiens
CAKGDAWTTSSKRGLFDFW

SEQ ID NO: 64527 - protein, 20 aa, Homo sapiens
CASDYCISDNCHDVDVFGIW

SEQ ID NO: 64528 - protein, 14 aa, Homo sapiens
CARGGMVHASPDYW

SEQ ID NO: 64529 - protein, 16 aa, Homo sapiens
CARDLSYPHITMIDYW

SEQ ID NO: 64530 - protein, 24 aa, Homo sapiens
CARVHETMIVVVINPYYYYYMDVW

SEQ ID NO: 64531 - protein, 20 aa, Homo sapiens
CTTEGALGFVQWVSRALDYW

SEQ ID NO: 64532 - protein, 12 aa, Homo sapiens
CLQYYTTPLLTF

SEQ ID NO: 64533 - protein, 19 aa, Homo sapiens
CARHPIDFWSGSNDAFDIW

SEQ ID NO: 64534 - protein, 22 aa, Homo sapiens
CARDRYQLRYFDWGRSDAFDIW

SEQ ID NO: 64535 - protein, 16 aa, Homo sapiens
CARVTGSGRGDWFAPW

SEQ ID NO: 64536 - protein, 21 aa, Homo sapiens
CATDLAVANQNYYYYYYMDVW

SEQ ID NO: 64537 - protein, 19 aa, Homo sapiens
CARRYIDNSGYYYDAFDMW

SEQ ID NO: 64538 - protein, 22 aa, Homo sapiens
CARVTRITIFGVVITGYYFDYW

SEQ ID NO: 64539 - protein, 17 aa, Homo sapiens
CAKEAGYSYGQKYLDSW

SEQ ID NO: 64540 - protein, 13 aa, Homo sapiens
CYSTDSGGNHRLF

SEQ ID NO: 64541 - protein, 24 aa, Homo sapiens
CARLRIAAAGTSEPGRPKYYFDYW

SEQ ID NO: 64542 - protein, 12 aa, Homo sapiens
CARGRRDDFEYW

SEQ ID NO: 64543 - protein, 16 aa, Homo sapiens
CARADSSGWFNWFDPW

SEQ ID NO: 64544 - protein, 14 aa, Homo sapiens
CARRVGGSTNFDFW

SEQ ID NO: 64545 - protein, 17 aa, Homo sapiens
CARGSPIVVVPAALDYW

SEQ ID NO: 64546 - protein, 14 aa, Homo sapiens
CARDFAYRYFFDYW

SEQ ID NO: 64547 - protein, 18 aa, Homo sapiens
CAKDLTARWGLLGYFDYW

SEQ ID NO: 64548 - protein, 19 aa, Homo sapiens
CARDESITMVPGLGWFDPW

SEQ ID NO: 64549 - protein, 20 aa, Homo sapiens
CAREDPPSCARTTCSSVDYW

SEQ ID NO: 64550 - protein, 21 aa, Homo sapiens
CATEFAYIVVVPAAGRGLDYW

SEQ ID NO: 64551 - protein, 20 aa, Homo sapiens
CARDRRGYCSNGVCYFFDYW

SEQ ID NO: 64552 - protein, 16 aa, Homo sapiens
CARDYSASGSYWFDPW

SEQ ID NO: 64553 - protein, 21 aa, Homo sapiens
CARVRKTWITIFGVVNAFDIW

SEQ ID NO: 64554 - protein, 19 aa, Homo sapiens
CARVETGYDWDYYYGMDVW

SEQ ID NO: 64555 - protein, 17 aa, Homo sapiens
CVASRNFYSDKSLFEYW

SEQ ID NO: 64556 - protein, 21 aa, Homo sapiens
CARRRGGPSSHSSGWYFFDYW

SEQ ID NO: 64557 - protein, 23 aa, Homo sapiens
CARVELGYCSSTSCYSIYYMDVW

SEQ ID NO: 64558 - protein, 18 aa, Homo sapiens
CARQVDHDFWSGYRFDPW

SEQ ID NO: 64559 - protein, 18 aa, Homo sapiens
CARTRDRGITAAGFFDYW

SEQ ID NO: 64560 - protein, 11 aa, Homo sapiens
CLSSDSSGPSF

SEQ ID NO: 64561 - protein, 20 aa, Homo sapiens
CARDSDYDFWSGYYNAFDIW

SEQ ID NO: 64562 - protein, 20 aa, Homo sapiens
CARTSWGYSNPLYYYYMDVW

SEQ ID NO: 64563 - protein, 20 aa, Homo sapiens
CARDPRDGYNSYYYYGMDVW

SEQ ID NO: 64564 - protein, 14 aa, Homo sapiens
CARLYKTWYYFDSW

SEQ ID NO: 64565 - protein, 14 aa, Homo sapiens
CARVRDIVAQQDYW

SEQ ID NO: 64566 - protein, 16 aa, Homo sapiens
CAKPLSVVRGVMRDYW

SEQ ID NO: 64567 - protein, 22 aa, Homo sapiens
CARDEFFGVVISNYYYSYMDVW

SEQ ID NO: 64568 - protein, 18 aa, Homo sapiens
CAKADLRTNRYSSALDVW

SEQ ID NO: 64569 - protein, 15 aa, Homo sapiens
CARTYYPLGGPFDYW

SEQ ID NO: 64570 - protein, 23 aa, Homo sapiens
CARLGGYWEQRLGDYYYFAMDVW

SEQ ID NO: 64571 - protein, 23 aa, Homo sapiens
CAKDGHDYVWGSYRYTGPHFDYW

SEQ ID NO: 64572 - protein, 16 aa, Homo sapiens
CAKAYSYGYLLAVDYW

SEQ ID NO: 64573 - protein, 21 aa, Homo sapiens
CTTGFRLWFGEFYYYYGMDVW

SEQ ID NO: 64574 - protein, 23 aa, Homo sapiens
CATNSLGPYYEFWSGFYKNFDYW

SEQ ID NO: 64575 - protein, 15 aa, Homo sapiens
CARELTRRTGDFDSW

SEQ ID NO: 64576 - protein, 23 aa, Homo sapiens
CTRDYYDSSGYYYAYYYYGMDVW

SEQ ID NO: 64577 - protein, 19 aa, Homo sapiens
CARDNGYYRHYYYYYMDVW

SEQ ID NO: 64578 - protein, 20 aa, Homo sapiens
CTTDGLILTGYYITFTFDYW

SEQ ID NO: 64579 - protein, 20 aa, Homo sapiens
CARRPSPRYLNYYYYYMDVW

SEQ ID NO: 64580 - protein, 15 aa, Homo sapiens
CARHGINGHQFFQYW

SEQ ID NO: 64581 - protein, 19 aa, Homo sapiens
CARDTHGTIFGVVTGFDYW

SEQ ID NO: 64582 - protein, 18 aa, Homo sapiens
CARDRSGSGSYYYGMDVW

SEQ ID NO: 64583 - protein, 16 aa, Homo sapiens
CAFIHDYYNSDYMDVW

SEQ ID NO: 64584 - protein, 17 aa, Homo sapiens
CATVVSNWNFDKALDYW

SEQ ID NO: 64585 - protein, 16 aa, Homo sapiens
CARDRDAGYDRYFDYW

SEQ ID NO: 64586 - protein, 19 aa, Homo sapiens
CAAERIALFGALVGYMDVW

SEQ ID NO: 64587 - protein, 18 aa, Homo sapiens
CARTDLGSSTPRVAFDIW

SEQ ID NO: 64588 - protein, 15 aa, Homo sapiens
CAKLPTGSDWYFDLW

SEQ ID NO: 64589 - protein, 23 aa, Homo sapiens
CARELLRQQLANRHYYYYGMDVW

SEQ ID NO: 64590 - protein, 21 aa, Homo sapiens
CAKDGALRVGATIRPGAFDIW

SEQ ID NO: 64591 - protein, 19 aa, Homo sapiens
CARAMVMPEAIEFTAFDYW

SEQ ID NO: 64592 - protein, 19 aa, Homo sapiens
CARSPSGGGACPWCHFDYW

SEQ ID NO: 64593 - protein, 20 aa, Homo sapiens
CARAHENDFWSYYYYYMDVW

SEQ ID NO: 64594 - protein, 19 aa, Homo sapiens
CVSSGYYPDYYYYYYMDVW

SEQ ID NO: 64595 - protein, 25 aa, Homo sapiens
CAKDQRNYDFWSALLPYYYYAMDVW

SEQ ID NO: 64596 - protein, 19 aa, Homo sapiens
CARAKGIGDKYGYGYFDSW

SEQ ID NO: 64597 - protein, 18 aa, Homo sapiens
CARDRYGDPPSHWYFDLW

SEQ ID NO: 64598 - protein, 15 aa, Homo sapiens
CARCIAARGLPLDYW

SEQ ID NO: 64599 - protein, 18 aa, Homo sapiens
CARQGDYYDSSGSSFDYW

SEQ ID NO: 64600 - protein, 23 aa, Homo sapiens
CATGYPPLRIVVVVARAWYFQHW

SEQ ID NO: 64601 - protein, 18 aa, Homo sapiens
CARGKKLDVPADGLFDSW

SEQ ID NO: 64602 - protein, 18 aa, Homo sapiens
CLGESWGEDYYYYGMDVW

SEQ ID NO: 64603 - protein, 23 aa, Homo sapiens
CARAPPQNYCPGSDCYPNWLDPW

SEQ ID NO: 64604 - protein, 17 aa, Homo sapiens
CAREGGSGGWSAYFDHW

SEQ ID NO: 64605 - protein, 18 aa, Homo sapiens
CAKGIAARRLPHLYFDYW

SEQ ID NO: 64606 - protein, 16 aa, Homo sapiens
CVRDIVCNSITCLDYW

SEQ ID NO: 64607 - protein, 15 aa, Homo sapiens
CVRVGYSGYVRFDHW

SEQ ID NO: 64608 - protein, 24 aa, Homo sapiens
CARTYDYDFWSGYPPRVNDAFDIW

SEQ ID NO: 64609 - protein, 18 aa, Homo sapiens
CARSVTAGYSYGDAFDLW

SEQ ID NO: 64610 - protein, 14 aa, Homo sapiens
CAKVDTVWNYFDYW

SEQ ID NO: 64611 - protein, 17 aa, Homo sapiens
CARMGSGGPGRWNFDYW

SEQ ID NO: 64612 - protein, 17 aa, Homo sapiens
CARVPDTAMVYWYFDVW

SEQ ID NO: 64613 - protein, 22 aa, Homo sapiens
CARRQFHYDSSGYESWNYFDYW

SEQ ID NO: 64614 - protein, 22 aa, Homo sapiens
CARDITGTRLYQRRDLNWFDPW

SEQ ID NO: 64615 - protein, 23 aa, Homo sapiens
CARVPQFGCSSTSCYEPDYMDVW

SEQ ID NO: 64616 - protein, 25 aa, Homo sapiens
CARVFRVVPAAIRRPYYYYYGMDVW

SEQ ID NO: 64617 - protein, 20 aa, Homo sapiens
CAREKIIGFLEDRTSGVDYW

SEQ ID NO: 64618 - protein, 23 aa, Homo sapiens
CARGIANQHMPPRGYFYYYMDVW

SEQ ID NO: 64619 - protein, 20 aa, Homo sapiens
CAKASMTTVTTYYYYYMDVW

SEQ ID NO: 64620 - protein, 21 aa, Homo sapiens
CARGRYHYDTSGYLRDALDFW

SEQ ID NO: 64621 - protein, 18 aa, Homo sapiens
CAKDLGLYSGYLYYFDYW

SEQ ID NO: 64622 - protein, 20 aa, Homo sapiens
CAKDATITGDYYYYYGMDVW

SEQ ID NO: 64623 - protein, 17 aa, Homo sapiens
CARDIRVNGDYGTSDYW

SEQ ID NO: 64624 - protein, 21 aa, Homo sapiens
CARDFWSGPNFTYYYYGMDVW

SEQ ID NO: 64625 - protein, 18 aa, Homo sapiens
CAKEMGTHSWYASTIDYW

SEQ ID NO: 64626 - protein, 26 aa, Homo sapiens
CARVYWRYCSSTSCSAPYYYYGMDVW

SEQ ID NO: 64627 - protein, 17 aa, Homo sapiens
CARHYDFWSGTNWFDPW

SEQ ID NO: 64628 - protein, 10 aa, Homo sapiens
CQERDNWPSF

SEQ ID NO: 64629 - protein, 21 aa, Homo sapiens
CTTGTIYYYDSSGYYFQADYW

SEQ ID NO: 64630 - protein, 18 aa, Homo sapiens
CARGIVGATWAMKYFDSW

SEQ ID NO: 64631 - protein, 17 aa, Homo sapiens
CARVRGGYSVYDCLDYW

SEQ ID NO: 64632 - protein, 19 aa, Homo sapiens
CAKNRFYYDSSGPSFFDYW

SEQ ID NO: 64633 - protein, 22 aa, Homo sapiens
CAKGGGITIFGVVVGVNWFDPW

SEQ ID NO: 64634 - protein, 17 aa, Homo sapiens
CAKDLLGIAVAVNFDYW

SEQ ID NO: 64635 - protein, 21 aa, Homo sapiens
CARAPLSAVDYYDSSGYWAYW

SEQ ID NO: 64636 - protein, 13 aa, Homo sapiens
CARGVIYKPCDYW

SEQ ID NO: 64637 - protein, 16 aa, Homo sapiens
CARDPLAVATYYFDYW

SEQ ID NO: 64638 - protein, 16 aa, Homo sapiens
CASSSNYDFWSGFDYW

SEQ ID NO: 64639 - protein, 27 aa, Homo sapiens
CARAYNINDYDFWSGYSHYYYYYMDVW

SEQ ID NO: 64640 - protein, 15 aa, Homo sapiens
CAKDASIAAAGSDYW

SEQ ID NO: 64641 - protein, 21 aa, Homo sapiens
CSSTSCYAETLFFGGYWFDPW

SEQ ID NO: 64642 - protein, 14 aa, Homo sapiens
CARGVYSGRAFDHW

SEQ ID NO: 64643 - protein, 18 aa, Homo sapiens
CAKLIGSSESSGGAFDIW

SEQ ID NO: 64644 - protein, 27 aa, Homo sapiens
CARDSPYCNGASCYVIISSSSWYFDSW

SEQ ID NO: 64645 - protein, 17 aa, Homo sapiens
CARVRSGYDSWRVIDYW

SEQ ID NO: 64646 - protein, 24 aa, Homo sapiens
CATLGGGYCSSTSCYGYYYGMDVW

SEQ ID NO: 64647 - protein, 22 aa, Homo sapiens
CARVEGYGSGDYLYYYYGLDVW

SEQ ID NO: 64648 - protein, 21 aa, Homo sapiens
CARIRYFDWLLYPVGGYFDYW

SEQ ID NO: 64649 - protein, 18 aa, Homo sapiens
CASEGRGSSFLRGYFDYW

SEQ ID NO: 64650 - protein, 12 aa, Homo sapiens
CTRYRAGAADYW

SEQ ID NO: 64651 - protein, 17 aa, Homo sapiens
CTKELIMGTTTRGFDYW

SEQ ID NO: 64652 - protein, 21 aa, Homo sapiens
CARAKGVYYYDSSGSDYMDVW

SEQ ID NO: 64653 - protein, 18 aa, Homo sapiens
CARGGTISGPGRAPFDYW

SEQ ID NO: 64654 - protein, 23 aa, Homo sapiens
CARLAERFTAMVKDYYYYYMDVW

SEQ ID NO: 64655 - protein, 13 aa, Homo sapiens
CARALPTQPYDYW

SEQ ID NO: 64656 - protein, 17 aa, Homo sapiens
CAKWSSFDSSWHYIDYW

SEQ ID NO: 64657 - protein, 20 aa, Homo sapiens
CAKTQWFGELLYTAEPFDHW

SEQ ID NO: 64658 - protein, 20 aa, Homo sapiens
CARDQKPYCSSTSCSGVDYW

SEQ ID NO: 64659 - protein, 19 aa, Homo sapiens
CARGLSYSSSYYWGGFDHW

SEQ ID NO: 64660 - protein, 16 aa, Homo sapiens
CAREREWLRFRGFDYW

SEQ ID NO: 64661 - protein, 20 aa, Homo sapiens
CARVFFDSLTGYSAYYFDYW

SEQ ID NO: 64662 - protein, 16 aa, Homo sapiens
CATRTTFLLGSLIDYW

SEQ ID NO: 64663 - protein, 18 aa, Homo sapiens
CVRGYCSSTSCPNWFDPW

SEQ ID NO: 64664 - protein, 18 aa, Homo sapiens
CARLVTAQTAHTDSFDIW

SEQ ID NO: 64665 - protein, 12 aa, Homo sapiens
CQQSFSAPRWTF

SEQ ID NO: 64666 - protein, 13 aa, Homo sapiens
CTTDEAVASFDRW

SEQ ID NO: 64667 - protein, 22 aa, Homo sapiens
CARVWDSCSGGSCFNNDYFDLW

SEQ ID NO: 64668 - protein, 17 aa, Homo sapiens
CARELVGPTRSDAFDLW

SEQ ID NO: 64669 - protein, 13 aa, Homo sapiens
CARNYGYSLFDYW

SEQ ID NO: 64670 - protein, 20 aa, Homo sapiens
CAKLAGGGITPQYGDYADYW

SEQ ID NO: 64671 - protein, 17 aa, Homo sapiens
CARGAQQLWLRTPFDYW

SEQ ID NO: 64672 - protein, 16 aa, Homo sapiens
CARRDTSGWYTYFDYW

SEQ ID NO: 64673 - protein, 16 aa, Homo sapiens
CAKILDGDYAGGLDYW

SEQ ID NO: 64674 - protein, 26 aa, Homo sapiens
CARDQERYCSSTSCYPLYWYYYMDVW

SEQ ID NO: 64675 - protein, 25 aa, Homo sapiens
CARDDCSSTSCYDGDYYYYYGMDVW

SEQ ID NO: 64676 - protein, 14 aa, Homo sapiens
CARDGFGSGYSKYW

SEQ ID NO: 64677 - protein, 21 aa, Homo sapiens
CATDITPYHSSSWYDFGFDPW

SEQ ID NO: 64678 - protein, 13 aa, Homo sapiens
CARIHVGIAADYW

SEQ ID NO: 64679 - protein, 14 aa, Homo sapiens
CARMEPDYWGLDYW

SEQ ID NO: 64680 - protein, 20 aa, Homo sapiens
CAKLWTYYYDSSGYHAFDIW

SEQ ID NO: 64681 - protein, 19 aa, Homo sapiens
CAREYCRNHNCFYEGFDVW

SEQ ID NO: 64682 - protein, 15 aa, Homo sapiens
CARAAAETLVYFDYW

SEQ ID NO: 64683 - protein, 14 aa, Homo sapiens
CAHRQGEVGAVDYW

SEQ ID NO: 64684 - protein, 17 aa, Homo sapiens
CARGLMMLGVAISFDYW

SEQ ID NO: 64685 - protein, 24 aa, Homo sapiens
CARDPAFVLTPYGANLGYNRFDSW

SEQ ID NO: 64686 - protein, 17 aa, Homo sapiens
CAKVWFGSSPGGHFDYW

SEQ ID NO: 64687 - protein, 23 aa, Homo sapiens
CARKGWRFLEWLLYQPDDAFDIW

SEQ ID NO: 64688 - protein, 18 aa, Homo sapiens
CARLDPRGSGFFSWFDTW

SEQ ID NO: 64689 - protein, 19 aa, Homo sapiens
CAKGSRYNYGYGRDSFDIW

SEQ ID NO: 64690 - protein, 15 aa, Homo sapiens
CAVVYIGDDDAFDIW

SEQ ID NO: 64691 - protein, 15 aa, Homo sapiens
CAGDGNNSPGSFHYW

SEQ ID NO: 64692 - protein, 11 aa, Homo sapiens
CMQALETTGGF

SEQ ID NO: 64693 - protein, 15 aa, Homo sapiens
CARQGYGDHATNDYW

SEQ ID NO: 64694 - protein, 24 aa, Homo sapiens
CATLAHISGFRYGIWGGVWYFEHW

SEQ ID NO: 64695 - protein, 20 aa, Homo sapiens
CARHIRSTLIAAAYYYFDYW

SEQ ID NO: 64696 - protein, 22 aa, Homo sapiens
CATYTPFRVGGVFNYHYYLDVW

SEQ ID NO: 64697 - protein, 16 aa, Homo sapiens
CSSSKPRYGDFYFDYW

SEQ ID NO: 64698 - protein, 11 aa, Homo sapiens
CVKGTGAFDIW

SEQ ID NO: 64699 - protein, 17 aa, Homo sapiens
CASNAGITYEFPAYDYW

SEQ ID NO: 64700 - protein, 19 aa, Homo sapiens
CARGISFLVRGSGSLGDYW

SEQ ID NO: 64701 - protein, 16 aa, Homo sapiens
CARHRPFWSGYYDDYW

SEQ ID NO: 64702 - protein, 13 aa, Homo sapiens
CQSSDSIGTSVVF

SEQ ID NO: 64703 - protein, 25 aa, Homo sapiens
CARDTIVVVPAATGPYYYYYGMDVW

SEQ ID NO: 64704 - protein, 23 aa, Homo sapiens
CAKEGGYYDSSGLLYYYYGMDVW

SEQ ID NO: 64705 - protein, 13 aa, Homo sapiens
CQQFNTLPSVNTF

SEQ ID NO: 64706 - protein, 25 aa, Homo sapiens
CARDQGRDIVVVPVYYYYYYGMDVW

SEQ ID NO: 64707 - protein, 18 aa, Homo sapiens
CAKDHEQQLGHLGYFDYW

SEQ ID NO: 64708 - protein, 22 aa, Homo sapiens
CALSQYYYDSSGPSGDMWFDPW

SEQ ID NO: 64709 - protein, 24 aa, Homo sapiens
CAREVSSLGNDFWSGYYNGWFDPW

SEQ ID NO: 64710 - protein, 16 aa, Homo sapiens
CARLLRMGLTRYFDFW

SEQ ID NO: 64711 - protein, 23 aa, Homo sapiens
CAKDRGSGYCSGGNCYSDGLDVW

SEQ ID NO: 64712 - protein, 14 aa, Homo sapiens
CAACDDSVSGLVVF

SEQ ID NO: 64713 - protein, 15 aa, Homo sapiens
CVRERDGHPYYLDYW

SEQ ID NO: 64714 - protein, 19 aa, Homo sapiens
CARGDFWSGYLGGSPFDYW

SEQ ID NO: 64715 - protein, 16 aa, Homo sapiens
CGKIALNYGDDYVDYW

SEQ ID NO: 64716 - protein, 19 aa, Homo sapiens
CARELGGGEYGGGRTFDYW

SEQ ID NO: 64717 - protein, 20 aa, Homo sapiens
CARDKGLTGITARPAWFDPW

SEQ ID NO: 64718 - protein, 18 aa, Homo sapiens
CAAGEWELLNYYYGMDVW

SEQ ID NO: 64719 - protein, 13 aa, Homo sapiens
CARDLGRDYMDVW

SEQ ID NO: 64720 - protein, 24 aa, Homo sapiens
CAREIPPSYVWGSYIGLLGYFDLW

SEQ ID NO: 64721 - protein, 17 aa, Homo sapiens
CARVAPPPGDYLAFDYW

SEQ ID NO: 64722 - protein, 20 aa, Homo sapiens
CTMRPHPTSGNFYYYGMDVW

SEQ ID NO: 64723 - protein, 22 aa, Homo sapiens
CARGHGGRYYDGTYYYNAMDVW

SEQ ID NO: 64724 - protein, 22 aa, Homo sapiens
CARGFDYYDESDFSLWGWFDPW

SEQ ID NO: 64725 - protein, 17 aa, Homo sapiens
CARPKGGYVPNDAFDLW

SEQ ID NO: 64726 - protein, 16 aa, Homo sapiens
CARGYSYAYRFLPDYW

SEQ ID NO: 64727 - protein, 15 aa, Homo sapiens
CARAVSMIVEVFDLW

SEQ ID NO: 64728 - protein, 17 aa, Homo sapiens
CATIVLMVYAIDDFDYW

SEQ ID NO: 64729 - protein, 15 aa, Homo sapiens
CAKDPTLGSGWYDYW

SEQ ID NO: 64730 - protein, 19 aa, Homo sapiens
CARGAYYYDSRAFNWFDPW

SEQ ID NO: 64731 - protein, 16 aa, Homo sapiens
CARERMIGGTRDLDYW

SEQ ID NO: 64732 - protein, 22 aa, Homo sapiens
CARGSWSRLSPRGYYYYGMDVW

SEQ ID NO: 64733 - protein, 18 aa, Homo sapiens
CGRIIEKDYSNYGGGDYW

SEQ ID NO: 64734 - protein, 20 aa, Homo sapiens
CARLAVITGYYYYYYGMDVW

SEQ ID NO: 64735 - protein, 19 aa, Homo sapiens
CARGRNSAYYRGRGAFDIW

SEQ ID NO: 64736 - protein, 19 aa, Homo sapiens
CARGPGSPYYYYYFYMDVW

SEQ ID NO: 64737 - protein, 16 aa, Homo sapiens
CASMIEIRLDWYFDLW

SEQ ID NO: 64738 - protein, 19 aa, Homo sapiens
CARPVSGTTPSYYYYMDVW

SEQ ID NO: 64739 - protein, 18 aa, Homo sapiens
CATSPSHYYTSPDGFDIW

SEQ ID NO: 64740 - protein, 16 aa, Homo sapiens
CARASEWELLGGFDYW

SEQ ID NO: 64741 - protein, 18 aa, Homo sapiens
CAREVISTRGGVNWIDPW

SEQ ID NO: 64742 - protein, 24 aa, Homo sapiens
CAIGARDYSAAVATHEGGGRFDYW

SEQ ID NO: 64743 - protein, 18 aa, Homo sapiens
CARDIYDRNYVGDAYDIW

SEQ ID NO: 64744 - protein, 22 aa, Homo sapiens
CARQVLRYFDPAAWVVHAFDMW

SEQ ID NO: 64745 - protein, 22 aa, Homo sapiens
CARWEDNGDYDGVLYYDGMDVW

SEQ ID NO: 64746 - protein, 22 aa, Homo sapiens
CARAHHRVYYYDSSGVRGFDPW

SEQ ID NO: 64747 - protein, 20 aa, Homo sapiens
CAKERYDHVWGRYTTAFDIW

SEQ ID NO: 64748 - protein, 16 aa, Homo sapiens
CSKGGLGSTSNWFDSW

SEQ ID NO: 64749 - protein, 14 aa, Homo sapiens
CAKSHTSDWNPDYW

SEQ ID NO: 64750 - protein, 21 aa, Homo sapiens
CVRGPDYYYESSGYPNWFDPW

SEQ ID NO: 64751 - protein, 17 aa, Homo sapiens
CARDLGQTVTQVTFDPW

SEQ ID NO: 64752 - protein, 22 aa, Homo sapiens
CAKDTRITIFGVVIASDAFDIW

SEQ ID NO: 64753 - protein, 16 aa, Homo sapiens
CARLSSASANTAFDIW

SEQ ID NO: 64754 - protein, 20 aa, Homo sapiens
CARVRDGLRFLEWFLVEDYW

SEQ ID NO: 64755 - protein, 13 aa, Homo sapiens
CAKGLSDDAFDIW

SEQ ID NO: 64756 - protein, 23 aa, Homo sapiens
CARGGEYYDFWSGYYIEYYFDYW

SEQ ID NO: 64757 - protein, 18 aa, Homo sapiens
CARALSASYPPNGAFDVW

SEQ ID NO: 64758 - protein, 22 aa, Homo sapiens
CARDRRLTIFGGALYYYGMDVW

SEQ ID NO: 64759 - protein, 16 aa, Homo sapiens
CAILHRTTVTTDFDYW

SEQ ID NO: 64760 - protein, 13 aa, Homo sapiens
CARGYDVSYFKSW

SEQ ID NO: 64761 - protein, 24 aa, Homo sapiens
CARTQSSSGYVRHPQNPQDAFDIW

SEQ ID NO: 64762 - protein, 20 aa, Homo sapiens
CARLHCSGGSCYSEGDFDSW

SEQ ID NO: 64763 - protein, 20 aa, Homo sapiens
CARERSEYSYGYRYWYFDLW

SEQ ID NO: 64764 - protein, 15 aa, Homo sapiens
CARGSSSTTTYGDYW

SEQ ID NO: 64765 - protein, 25 aa, Homo sapiens
CARASSPRDYDILTGYPLDDAFDIW

SEQ ID NO: 64766 - protein, 17 aa, Homo sapiens
CARVPRLFGALYYFEYW

SEQ ID NO: 64767 - protein, 19 aa, Homo sapiens
CAKDFSGWYASAPEAFDYW

SEQ ID NO: 64768 - protein, 22 aa, Homo sapiens
CAKDSFRRDDGSGSRRGGFDYW

SEQ ID NO: 64769 - protein, 18 aa, Homo sapiens
CAAVYDFWSGYYTAIDYW

SEQ ID NO: 64770 - protein, 25 aa, Homo sapiens
CAREMDYYDSSGYVPLDYYYGMDVW

SEQ ID NO: 64771 - protein, 22 aa, Homo sapiens
CAHIKTFTTMFGVVGSLVFDIW

SEQ ID NO: 64772 - protein, 22 aa, Homo sapiens
CARARVQLVWGWTTKHNWFDPW

SEQ ID NO: 64773 - protein, 21 aa, Homo sapiens
CARSGEHSSGSGTYYPISDYW

SEQ ID NO: 64774 - protein, 16 aa, Homo sapiens
CARSYNWNYGLDFDHW

SEQ ID NO: 64775 - protein, 17 aa, Homo sapiens
CAKNRRYSYGIYSFDYW

SEQ ID NO: 64776 - protein, 15 aa, Homo sapiens
CARDDQRYFPYLDYW

SEQ ID NO: 64777 - protein, 15 aa, Homo sapiens
CVSRLYRNSWYVTYW

SEQ ID NO: 64778 - protein, 12 aa, Homo sapiens
CQQHNFWPPVAF

SEQ ID NO: 64779 - protein, 24 aa, Homo sapiens
CARVVDFPLMATGNTELGHFFDSW

SEQ ID NO: 64780 - protein, 21 aa, Homo sapiens
CARAGAGITIFGVVIHAFDIW

SEQ ID NO: 64781 - protein, 14 aa, Homo sapiens [sequence omitted]

SEQ ID NO: 64782 - protein, 30 aa, Homo sapiens
CARGPGRKGYDFWSGYFGGESYYYYGMDVW

SEQ ID NO: 64783 - protein, 21 aa, Homo sapiens
CAKSNYDFWSGPHRPYYMDVW

SEQ ID NO: 64784 - protein, 22 aa, Homo sapiens
CARDQITMVRGSPSYYYGMDVW

SEQ ID NO: 64785 - protein, 17 aa, Homo sapiens
CARGTSGYDPLGWFDPW

SEQ ID NO: 64786 - protein, 12 aa, Homo sapiens
CQQHGTSPRINF

SEQ ID NO: 64787 - protein, 22 aa, Homo sapiens
CARCAPVTMVRGVIPGNWFDPW

SEQ ID NO: 64788 - protein, 15 aa, Homo sapiens
CATAFPSGGVVHDYW

SEQ ID NO: 64789 - protein, 23 aa, Homo sapiens
CATLGGVDTAMVHDYYYYGMDVW

SEQ ID NO: 64790 - protein, 21 aa, Homo sapiens
CARRKGSTIFGVVSLYYFDYW

SEQ ID NO: 64791 - protein, 14 aa, Homo sapiens
CSAWDSSLSGLYVF

SEQ ID NO: 64792 - protein, 17 aa, Homo sapiens
CTHLTGAYDYSNRLDPW

SEQ ID NO: 64793 - protein, 15 aa, Homo sapiens
CAKEVAAVPNWFDPW

SEQ ID NO: 64794 - protein, 17 aa, Homo sapiens
CAGAKIQPRGVGWFDPW

SEQ ID NO: 64795 - protein, 14 aa, Homo sapiens
CARDGEDYDVTDYW

SEQ ID NO: 64796 - protein, 16 aa, Homo sapiens
CARLRYTTGWIPFDYW

SEQ ID NO: 64797 - protein, 13 aa, Homo sapiens
CQQYSSSPPPWKF

SEQ ID NO: 64798 - protein, 15 aa, Homo sapiens
CAKEVVVVPAASDYW

SEQ ID NO: 64799 - protein, 19 aa, Homo sapiens
CARVNYYHGSGISYYMDLW

SEQ ID NO: 64800 - protein, 18 aa, Homo sapiens
CARERGSNARGYYAMDVW

SEQ ID NO: 64801 - protein, 20 aa, Homo sapiens
CAVIGASRRHLLTGYPFEYW

SEQ ID NO: 64802 - protein, 15 aa, Homo sapiens
CARRGMYGQGTFDIW

SEQ ID NO: 64803 - protein, 16 aa, Homo sapiens
CARDFLKYSGYEFDSW

SEQ ID NO: 64804 - protein, 21 aa, Homo sapiens
CAKDIRITMVRGVILGPIDYW

SEQ ID NO: 64805 - protein, 13 aa, Homo sapiens
CASCGRYDTFDNW

SEQ ID NO: 64806 - protein, 17 aa, Homo sapiens
CARDWDYAGYPDVFDIW

SEQ ID NO: 64807 - protein, 22 aa, Homo sapiens
CARDPPRRAGVVVTDTGYFDYW

SEQ ID NO: 64808 - protein, 13 aa, Homo sapiens
CARGAGSKYFQHW

SEQ ID NO: 64809 - protein, 18 aa, Homo sapiens
CARDLPSKGGRNNWFDPW

SEQ ID NO: 64810 - protein, 18 aa, Homo sapiens
CAHRRLLDDFSNRPLDYW

SEQ ID NO: 64811 - protein, 13 aa, Homo sapiens
CARGGSATLYDYW

SEQ ID NO: 64812 - protein, 20 aa, Homo sapiens
CARSNHIVLMVYDYYGMDVW

SEQ ID NO: 64813 - protein, 24 aa, Homo sapiens
CASTPTVEMATIWTAVIFGYFDYW

SEQ ID NO: 64814 - protein, 19 aa, Homo sapiens
CARGVVVPVYYYYYYMDVW

SEQ ID NO: 64815 - protein, 14 aa, Homo sapiens
CAKFSSGWHPVDYW

SEQ ID NO: 64816 - protein, 17 aa, Homo sapiens
CARGDESGDWDAYFDFW

SEQ ID NO: 64817 - protein, 19 aa, Homo sapiens
CARDLTMIVVVRAYYFDYW

SEQ ID NO: 64818 - protein, 15 aa, Homo sapiens
CAKVAYGDNNYFDYW

SEQ ID NO: 64819 - protein, 16 aa, Homo sapiens
CVREDYGGHLDVFDIW

SEQ ID NO: 64820 - protein, 17 aa, Homo sapiens
CARVLVAAAGPQLLDYW

SEQ ID NO: 64821 - protein, 12 aa, Homo sapiens
CQQLIEYPPYNF

SEQ ID NO: 64822 - protein, 19 aa, Homo sapiens
CARMHRESARDWFGAFDYW

SEQ ID NO: 64823 - protein, 19 aa, Homo sapiens
CARTVALESGGWFAYFDYW

SEQ ID NO: 64824 - protein, 17 aa, Homo sapiens
CAREGVVAARYAWFDPW

SEQ ID NO: 64825 - protein, 18 aa, Homo sapiens
CARVNRVTTVTTPAFDIW

SEQ ID NO: 64826 - protein, 20 aa, Homo sapiens
CAKTQGYCTRTNCFAFPDYW

SEQ ID NO: 64827 - protein, 19 aa, Homo sapiens
CATPGGETNRRGKGYFNYW

SEQ ID NO: 64828 - protein, 16 aa, Homo sapiens
CAKANVIRGLGAYDYW

SEQ ID NO: 64829 - protein, 17 aa, Homo sapiens
CARDLAGVPAAIGIDYW

SEQ ID NO: 64830 - protein, 21 aa, Homo sapiens
CAHRRSTEWELHGDCDAFDIW

SEQ ID NO: 64831 - protein, 24 aa, Homo sapiens
CARHSSLYYSDSSGNRKNNYFDPW

SEQ ID NO: 64832 - protein, 11 aa, Homo sapiens
CVRDDYYFDYW

SEQ ID NO: 64833 - protein, 20 aa, Homo sapiens
CASLDHYDSSDYYYGPSDYW

SEQ ID NO: 64834 - protein, 19 aa, Homo sapiens
CARGGWATVVIPPYAFDIW

SEQ ID NO: 64835 - protein, 14 aa, Homo sapiens
CARLGWLRGNFDYW

SEQ ID NO: 64836 - protein, 18 aa, Homo sapiens
CAFGYISGYYSAFYFDSW

SEQ ID NO: 64837 - protein, 24 aa, Homo sapiens
CARVGLIRTIFGVVIMKGDWFDPW

SEQ ID NO: 64838 - protein, 22 aa, Homo sapiens
CAKVMFETGTFHTWRVDALDVW

SEQ ID NO: 64839 - protein, 21 aa, Homo sapiens
CARDLPYYYGSDYYYYGMDVW

SEQ ID NO: 64840 - protein, 23 aa, Homo sapiens
CAKDSARGPSSPRGYYYYGMDVW

SEQ ID NO: 64841 - protein, 19 aa, Homo sapiens
CARDGSGTNGYYYYGMDVW

SEQ ID NO: 64842 - protein, 16 aa, Homo sapiens
CATGQHWSREVIFDFW

SEQ ID NO: 64843 - protein, 22 aa, Homo sapiens
CARAGWITFGGVIVPQGWFDPW

SEQ ID NO: 64844 - protein, 20 aa, Homo sapiens
CARGYCSDYSCYFTYYFDSW

SEQ ID NO: 64845 - protein, 21 aa, Homo sapiens
CARDVVPVARYSSPSAWFDPW

SEQ ID NO: 64846 - protein, 16 aa, Homo sapiens
CAHSGSYGHGFYFDFW

SEQ ID NO: 64847 - protein, 17 aa, Homo sapiens
CARQNILRRVQAPSDYW

SEQ ID NO: 64848 - protein, 18 aa, Homo sapiens
CARDRRGPEYANLGGDYW

SEQ ID NO: 64849 - protein, 20 aa, Homo sapiens
CAKDSYNWNDVHYYYGMDVW

SEQ ID NO: 64850 - protein, 23 aa, Homo sapiens
CARRYMVANLRFLEWLPGVFDYW

SEQ ID NO: 64851 - protein, 16 aa, Homo sapiens
CARVSYDSSGWSLDYW

SEQ ID NO: 64852 - protein, 19 aa, Homo sapiens
CATPRGSIWFGELLELDYW

SEQ ID NO: 64853 - protein, 26 aa, Homo sapiens
CARESSREIFLIPSADTLSGWYFDLW

SEQ ID NO: 64854 - protein, 18 aa, Homo sapiens
CTRWWGIPATGSGYFDYW

SEQ ID NO: 64855 - protein, 21 aa, Homo sapiens
CTTDATWYYDSSGYSAVVDYW

SEQ ID NO: 64856 - protein, 15 aa, Homo sapiens
CARRPYRQWYYMDVW

SEQ ID NO: 64857 - protein, 19 aa, Homo sapiens
CARRRLFGFSEGTSAFDIW

SEQ ID NO: 64858 - protein, 24 aa, Homo sapiens
CARITGGYDFWSGNYYGRHYFDYW

SEQ ID NO: 64859 - protein, 15 aa, Homo sapiens
CAKDSEYGDSYFDYW

SEQ ID NO: 64860 - protein, 14 aa, Homo sapiens
CGTLFGVVNPFDYW

SEQ ID NO: 64861 - protein, 20 aa, Homo sapiens
CATDLVHYDFWSGLGPFDYW

SEQ ID NO: 64862 - protein, 19 aa, Homo sapiens
CAKIKDTTRTYYYFGMDVW

SEQ ID NO: 64863 - protein, 18 aa, Homo sapiens
CARAHSSLFTTRTAFDIW

SEQ ID NO: 64864 - protein, 15 aa, Homo sapiens
CAREAAVSSSGLDYW

SEQ ID NO: 64865 - protein, 19 aa, Homo sapiens
CARTIVADTVRPYWYFDLW

SEQ ID NO: 64866 - protein, 24 aa, Homo sapiens
CAREVSTMIVVVITAYYYYYMDVW

SEQ ID NO: 64867 - protein, 18 aa, Homo sapiens
CARHFPEYTHNWYYFDVW

SEQ ID NO: 64868 - protein, 20 aa, Homo sapiens
CARDTFIYNNGKTLSGFDIW

SEQ ID NO: 64869 - protein, 14 aa, Homo sapiens
CATNGGDSGIADYW

SEQ ID NO: 64870 - protein, 14 aa, Homo sapiens
CARLPHAIRAFDIW

SEQ ID NO: 64871 - protein, 18 aa, Homo sapiens
CAREVPAAIPDYYYMDVW

SEQ ID NO: 64872 - protein, 22 aa, Homo sapiens
CARHDFVVVPAAIRGSGAFDIW

SEQ ID NO: 64873 - protein, 16 aa, Homo sapiens
CARVTTGDYYPHFDSW

SEQ ID NO: 64874 - protein, 19 aa, Homo sapiens
CAHCSVTMVRGAIRGFDPW

SEQ ID NO: 64875 - protein, 17 aa, Homo sapiens
CGKARSVAGRPHFFDYW

SEQ ID NO: 64876 - protein, 21 aa, Homo sapiens
CARRTPMVVVAAVPKDAFDIW

SEQ ID NO: 64877 - protein, 30 aa, Homo sapiens
CARDHNVRRYCSSTSCYPPMGHYYYYMDVW

SEQ ID NO: 64878 - protein, 18 aa, Homo sapiens
CARCGPESYSWGYYFDYW

SEQ ID NO: 64879 - protein, 17 aa, Homo sapiens
CARPLAFSATLFYFDSW

SEQ ID NO: 64880 - protein, 23 aa, Homo sapiens
CARGEDYYGSGSYSLQSVWFDPW

SEQ ID NO: 64881 - protein, 20 aa, Homo sapiens
CAKEVALYSSGWYVRGFDYW

SEQ ID NO: 64882 - protein, 21 aa, Homo sapiens
CARVRRITIFGVVIAAAFDIW

SEQ ID NO: 64883 - protein, 15 aa, Homo sapiens
CAKREYSSQHYLDSW

SEQ ID NO: 64884 - protein, 21 aa, Homo sapiens
CARVDAYYYDGSGYLNHFDYW

SEQ ID NO: 64885 - protein, 26 aa, Homo sapiens
CAKDKIDRGLWFGESPNDYYYYMDVW

SEQ ID NO: 64886 - protein, 22 aa, Homo sapiens
CVSGGYYHGSGDYYYYYGMDVW

SEQ ID NO: 64887 - protein, 17 aa, Homo sapiens
CTRGGYDTSGGDYFEFW

SEQ ID NO: 64888 - protein, 17 aa, Homo sapiens
CAKTFGDDYAREGFDIW

SEQ ID NO: 64889 - protein, 19 aa, Homo sapiens
CARVALAAARDYYYYMDVW

SEQ ID NO: 64890 - protein, 22 aa, Homo sapiens
CATDSRQKLRFLEWLLQPFDYW

SEQ ID NO: 64891 - protein, 23 aa, Homo sapiens
CARANGRISLRYFEWLFHAFDMW

SEQ ID NO: 64892 - protein, 17 aa, Homo sapiens
CARHLQQLASFYYFDYW

SEQ ID NO: 64893 - protein, 17 aa, Homo sapiens
CASRGSSSWSRGAFDIW

SEQ ID NO: 64894 - protein, 18 aa, Homo sapiens
CAKGLTDAISGHDAFDVW

SEQ ID NO: 64895 - protein, 18 aa, Homo sapiens
CASVSSDHLYYYYGMDVW

SEQ ID NO: 64896 - protein, 19 aa, Homo sapiens
CARFDSRRIRFPAGGFDPW

SEQ ID NO: 64897 - protein, 15 aa, Homo sapiens
CARLTTETTNWFDPW

SEQ ID NO: 64898 - protein, 20 aa, Homo sapiens
CAKDVRYYDFWSGYSYFDYW

SEQ ID NO: 64899 - protein, 20 aa, Homo sapiens
CAREEETMVRGYYYYYMDVW

SEQ ID NO: 64900 - protein, 14 aa, Homo sapiens
CARSIAVAATHDYW

SEQ ID NO: 64901 - protein, 16 aa, Homo sapiens
CARHGTAARPKAFDIW

SEQ ID NO: 64902 - protein, 19 aa, Homo sapiens
CARRSPLYFGESFGAFDIW

SEQ ID NO: 64903 - protein, 18 aa, Homo sapiens
CARHPSTWIQLWFAFDYW

SEQ ID NO: 64904 - protein, 25 aa, Homo sapiens
CARVQPKDRLKEYSYVSRPSWFDPW

SEQ ID NO: 64905 - protein, 21 aa, Homo sapiens
CAARLRYCTSTFCLQSNNDYW

SEQ ID NO: 64906 - protein, 16 aa, Homo sapiens
CAKGASAADKNYFDNW

SEQ ID NO: 64907 - protein, 16 aa, Homo sapiens
CATAYYDTSGHYRDYW

SEQ ID NO: 64908 - protein, 23 aa, Homo sapiens
CARVIEYCSSTSCLSVEDGFDIW

SEQ ID NO: 64909 - protein, 16 aa, Homo sapiens
CARGFSGWYLGVVDYW

SEQ ID NO: 64910 - protein, 22 aa, Homo sapiens
CTTDQGMALVPPAIQNNWFDPW

SEQ ID NO: 64911 - protein, 13 aa, Homo sapiens
CRYYDESGQGDYW

SEQ ID NO: 64912 - protein, 21 aa, Homo sapiens
CARELGIVSPVPIQNWYFDLW

SEQ ID NO: 64913 - protein, 17 aa, Homo sapiens
CASPRGQQLVQNSFDYW

SEQ ID NO: 64914 - protein, 17 aa, Homo sapiens
CRSLEDGDYYYYFMDVW

SEQ ID NO: 64915 - protein, 15 aa, Homo sapiens
CQSADSSASYQGWVF

SEQ ID NO: 64916 - protein, 20 aa, Homo sapiens
CARQAHCTTARCYLNAFDIW

SEQ ID NO: 64917 - protein, 20 aa, Homo sapiens
CARDLGAPGTNYYYYGLDVW

SEQ ID NO: 64918 - protein, 21 aa, Homo sapiens
CAKDIDLMGTPTGGEYAFDVW

SEQ ID NO: 64919 - protein, 16 aa, Homo sapiens
CARHRSSSWTWYFDLW

SEQ ID NO: 64920 - protein, 19 aa, Homo sapiens
CAKATYYYDSSGYTHFDYW

SEQ ID NO: 64921 - protein, 15 aa, Homo sapiens
CARESYGFGSPSDYW

SEQ ID NO: 64922 - protein, 26 aa, Homo sapiens
CAGGDATARKDGRSGFNYFYSALDVW

SEQ ID NO: 64923 - protein, 20 aa, Homo sapiens
CARPQATHQHYSSSWLFDYW

SEQ ID NO: 64924 - protein, 18 aa, Homo sapiens
CARIAKQELLEEYYFDYW

SEQ ID NO: 64925 - protein, 14 aa, Homo sapiens
CARDGPMTTLFDSW

SEQ ID NO: 64926 - protein, 21 aa, Homo sapiens
CARGSYASGGWLPTYFYFESW

SEQ ID NO: 64927 - protein, 23 aa, Homo sapiens
CARTNPRGFCSATTCYVTVFDVW

SEQ ID NO: 64928 - protein, 19 aa, Homo sapiens
CARVFRPERWLQLGAFDIW

SEQ ID NO: 64929 - protein, 17 aa, Homo sapiens
CARDQIEDILTGYHDYW

SEQ ID NO: 64930 - protein, 22 aa, Homo sapiens
CARQRHYDFWSGSRRNNWFDPW

SEQ ID NO: 64931 - protein, 20 aa, Homo sapiens
CARDGTVAGYSYGYLNFDYW

SEQ ID NO: 64932 - protein, 21 aa, Homo sapiens
CTTVMITFGGVIVSDAGFDYW

SEQ ID NO: 64933 - protein, 22 aa, Homo sapiens
CARCTVSCSGNSCYTRNAFDVW

SEQ ID NO: 64934 - protein, 17 aa, Homo sapiens
CAKDLAPAATLNWFDPW

SEQ ID NO: 64935 - protein, 17 aa, Homo sapiens
CATGPPDPWNGANSDYW

SEQ ID NO: 64936 - protein, 18 aa, Homo sapiens
CARDQGTYYYGSGSPDYW

SEQ ID NO: 64937 - protein, 17 aa, Homo sapiens
CARDGSMGTIYWYFDLW

SEQ ID NO: 64938 - protein, 16 aa, Homo sapiens
CAKSFVHGRGFYFDYW

SEQ ID NO: 64939 - protein, 16 aa, Homo sapiens
CARGSPQAWTLQLDYW

SEQ ID NO: 64940 - protein, 15 aa, Homo sapiens
CASRGPVASDAFAIW

SEQ ID NO: 64941 - protein, 24 aa, Homo sapiens
CARGSRRSYYDFWSANPNWYFDLW

SEQ ID NO: 64942 - protein, 19 aa, Homo sapiens
CARDRKDFGVADNNWFDPW

SEQ ID NO: 64943 - protein, 17 aa, Homo sapiens
CARGPPLGSSSGLTDYW

SEQ ID NO: 64944 - protein, 13 aa, Homo sapiens
CQQTYNTPPDNSF

SEQ ID NO: 64945 - protein, 18 aa, Homo sapiens
CARVRGMGLYYYYGMDVW

SEQ ID NO: 64946 - protein, 17 aa, Homo sapiens
CAREAVVEVPRGLFDYW

SEQ ID NO: 64947 - protein, 14 aa, Homo sapiens
CATDPTFRGWFDPW

SEQ ID NO: 64948 - protein, 16 aa, Homo sapiens
CARDGIAASGDTFDFW

SEQ ID NO: 64949 - protein, 17 aa, Homo sapiens
CAKDVSLYYALDYFDYW

SEQ ID NO: 64950 - protein, 20 aa, Homo sapiens
CTRTYYYHTSGFPYDAFDIW

SEQ ID NO: 64951 - protein, 19 aa, Homo sapiens
CARGNHYDFWSGYCIVDYW

SEQ ID NO: 64952 - protein, 14 aa, Homo sapiens
CQSYDSSNHPQVVF

SEQ ID NO: 64953 - protein, 26 aa, Homo sapiens
CAKDRAHIVVVPAAPPSYYYYGMDVW

SEQ ID NO: 64954 - protein, 18 aa, Homo sapiens
CARDKENRVGATGAFDIW

SEQ ID NO: 64955 - protein, 18 aa, Homo sapiens
CATRLSGSTWYLDYFNYW

SEQ ID NO: 64956 - protein, 25 aa, Homo sapiens
CVTDPIGHFAPGDYSKRPTRAFDIW

SEQ ID NO: 64957 - protein, 17 aa, Homo sapiens
CAKGDTAMVPYNWFDPW

SEQ ID NO: 64958 - protein, 19 aa, Homo sapiens
CASRFYDSSGYYYPSLDYW

SEQ ID NO: 64959 - protein, 13 aa, Homo sapiens
CQSYDSSLRAGIF

SEQ ID NO: 64960 - protein, 17 aa, Homo sapiens
CAKSSGSSKGVGWFDPW

SEQ ID NO: 64961 - protein, 18 aa, Homo sapiens
CARLGYSNGWYHYYMDVW

SEQ ID NO: 64962 - protein, 16 aa, Homo sapiens
CAKEGQLVPENYFDYW

SEQ ID NO: 64963 - protein, 14 aa, Homo sapiens
CARQGWLQLPGDYW

SEQ ID NO: 64964 - protein, 17 aa, Homo sapiens
CARGAIGDNVVFYFDYW

SEQ ID NO: 64965 - protein, 17 aa, Homo sapiens
CATAGPSRWESYYFDFW

SEQ ID NO: 64966 - protein, 25 aa, Homo sapiens
CAKDFMLSEPTIFGVVNYYYGMDVW

SEQ ID NO: 64967 - protein, 18 aa, Homo sapiens
CAKTIAGTVFRGSYFDYW

SEQ ID NO: 64968 - protein, 18 aa, Homo sapiens
CARVSYYDRSGYRRFDYW

SEQ ID NO: 64969 - protein, 15 aa, Homo sapiens
CARDSTSLYNYFDPW

SEQ ID NO: 64970 - protein, 20 aa, Homo sapiens
CARDRGFVITFGGVMNPDYW

SEQ ID NO: 64971 - protein, 18 aa, Homo sapiens
CARDDYGGRGSGEKGDYW

SEQ ID NO: 64972 - protein, 15 aa, Homo sapiens
CTRDLYPTSTPFDYW

SEQ ID NO: 64973 - protein, 19 aa, Homo sapiens
CARDEPINSSGWRFNLDYW

SEQ ID NO: 64974 - protein, 19 aa, Homo sapiens
CAREGGDIVEVPGPIFDYW

SEQ ID NO: 64975 - protein, 14 aa, Homo sapiens
CHSWIQLWGRFDYW

SEQ ID NO: 64976 - protein, 17 aa, Homo sapiens
CARRKYDSRGYYWFDPW

SEQ ID NO: 64977 - protein, 14 aa, Homo sapiens
CVSYSAYGDYFDHW

SEQ ID NO: 64978 - protein, 21 aa, Homo sapiens
CARHGPKYSSSTGASFAFDIW

SEQ ID NO: 64979 - protein, 13 aa, Homo sapiens
CARTTMIVAFDIW

SEQ ID NO: 64980 - protein, 27 aa, Homo sapiens
CARNADYDFWSGYPPRYYYYYYGMDVW

SEQ ID NO: 64981 - protein, 19 aa, Homo sapiens
CATPAPSIFGVVNLGFDIW

SEQ ID NO: 64982 - protein, 18 aa, Homo sapiens
CAHLKSLLWFGELLFDYW

SEQ ID NO: 64983 - protein, 17 aa, Homo sapiens
CARDEMDTNYYYGMDVW

SEQ ID NO: 64984 - protein, 15 aa, Homo sapiens
CARIIGTYFHWFDPW

SEQ ID NO: 64985 - protein, 18 aa, Homo sapiens
CARGSITVIRGVISFDSW

SEQ ID NO: 64986 - protein, 16 aa, Homo sapiens
CASPSKGLWSHYFDYW

SEQ ID NO: 64987 - protein, 20 aa, Homo sapiens
CARDSMVYVNYYYYYGMDVW

SEQ ID NO: 64988 - protein, 17 aa, Homo sapiens
CAKDLSYDSSGYFSDYW

SEQ ID NO: 64989 - protein, 19 aa, Homo sapiens
CARGEIVLMVDASRYFDYW

SEQ ID NO: 64990 - protein, 18 aa, Homo sapiens
CTTGGLRTTMTTYAFDIW

SEQ ID NO: 64991 - protein, 22 aa, Homo sapiens
CARDVALYSIYMGGYYYYLDVW

SEQ ID NO: 64992 - protein, 22 aa, Homo sapiens
CARDRRTITFGGVIVQSPDDYW

SEQ ID NO: 64993 - protein, 15 aa, Homo sapiens
CAKLGAHEGDWVDYW

SEQ ID NO: 64994 - protein, 18 aa, Homo sapiens
CARAEIEVVGVSKWFDPW

SEQ ID NO: 64995 - protein, 18 aa, Homo sapiens
CARSSSFRMGYYYYMDVW

SEQ ID NO: 64996 - protein, 19 aa, Homo sapiens
CARLSGCSSTSCQYYFDYW

SEQ ID NO: 64997 - protein, 16 aa, Homo sapiens
CALASDFILGDAFDTW

SEQ ID NO: 64998 - protein, 23 aa, Homo sapiens
CASNTIGESIFGVVIRESKFDHW

SEQ ID NO: 64999 - protein, 19 aa, Homo sapiens
CAHRITVTNTAIPPYFDFW

SEQ ID NO: 65000 - protein, 15 aa, Homo sapiens
CTTGSTSWHGYFDLW

SEQ ID NO: 65001 - protein, 18 aa, Homo sapiens
CARLRGEPGGPFDAFDLW

SEQ ID NO: 65002 - protein, 18 aa, Homo sapiens
CARERDVYDSNLGGKDYW

SEQ ID NO: 65003 - protein, 18 aa, Homo sapiens
CARDVYYYDSLINWFDPW

SEQ ID NO: 65004 - protein, 18 aa, Homo sapiens
CARAVPAARRITNWFDPW

SEQ ID NO: 65005 - protein, 14 aa, Homo sapiens
CARETVAGPTFDYW

SEQ ID NO: 65006 - protein, 19 aa, Homo sapiens
CASLYCSSTSCYQNWFDPW

SEQ ID NO: 65007 - protein, 22 aa, Homo sapiens
CARRVEATPGNEKDQYNWFDPW

SEQ ID NO: 65008 - protein, 25 aa, Homo sapiens
CAREKINTYYYDSSGSMTENWFDPW

SEQ ID NO: 65009 - protein, 17 aa, Homo sapiens
CARGPNWNDGLYYFDYW

SEQ ID NO: 65010 - protein, 22 aa, Homo sapiens
CARHPPMFIHLGELSSPYFDSW

SEQ ID NO: 65011 - protein, 23 aa, Homo sapiens
CARGPYCDSFSCDDDYYYGMDVW

SEQ ID NO: 65012 - protein, 21 aa, Homo sapiens
CAREALNCTSTRCFWGYFDSW

SEQ ID NO: 65013 - protein, 19 aa, Homo sapiens
CARDCGGNCSSTSCAFDPW

SEQ ID NO: 65014 - protein, 23 aa, Homo sapiens
CARDLAVTTLSSAEYYYYGMDVW

SEQ ID NO: 65015 - protein, 17 aa, Homo sapiens
CAKGYSGYTLLTYFHYW

SEQ ID NO: 65016 - protein, 22 aa, Homo sapiens
CARITTAKTPPNYYYYYGMDVW

SEQ ID NO: 65017 - protein, 17 aa, Homo sapiens
CAKVLYRSGWNDAFDVW

SEQ ID NO: 65018 - protein, 17 aa, Homo sapiens
CVKDYISGDGPWAFDHW

SEQ ID NO: 65019 - protein, 20 aa, Homo sapiens
CARVPKGGYSFYYYYYMDVW

SEQ ID NO: 65020 - protein, 15 aa, Homo sapiens
CATSVDTYEDFFDYW

SEQ ID NO: 65021 - protein, 19 aa, Homo sapiens
CARELRGTLYYYYYGMDVW

SEQ ID NO: 65022 - protein, 16 aa, Homo sapiens
CARGPQGAPWGWFDPW

SEQ ID NO: 65023 - protein, 20 aa, Homo sapiens
CATHLLWFGETGKLDAFDIW

SEQ ID NO: 65024 - protein, 23 aa, Homo sapiens
CARDSERYSSSWSVAWYYYMDVW

SEQ ID NO: 65025 - protein, 17 aa, Homo sapiens
CARPRGGSGYSDSFDVW

SEQ ID NO: 65026 - protein, 15 aa, Homo sapiens
CARARCGSYCGVDYW

SEQ ID NO: 65027 - protein, 14 aa, Homo sapiens
CARLAPRPEYFVHW

SEQ ID NO: 65028 - protein, 18 aa, Homo sapiens
CARHLPIAAADYWHFDLW

SEQ ID NO: 65029 - protein, 22 aa, Homo sapiens
CARIRMSVVVPTTISPFLFDPW

SEQ ID NO: 65030 - protein, 18 aa, Homo sapiens
CAREVVNYGDWTNWFDPW

SEQ ID NO: 65031 - protein, 22 aa, Homo sapiens
CAHSWYCSGGSCYPYYYGMDVW

SEQ ID NO: 65032 - protein, 19 aa, Homo sapiens
CARGVVIPTTAGKFYFDSW

SEQ ID NO: 65033 - protein, 18 aa, Homo sapiens
CARDLYAWSTILVGFDYW

SEQ ID NO: 65034 - protein, 18 aa, Homo sapiens
CARGSVTIIRGIISLDYW

SEQ ID NO: 65035 - protein, 14 aa, Homo sapiens
CARVRRFPRVFDLW

SEQ ID NO: 65036 - protein, 19 aa, Homo sapiens
CAKDSSTGQWLIENRFDPW

SEQ ID NO: 65037 - protein, 23 aa, Homo sapiens
CARDQMHRGAQYESRGTEILDYW

SEQ ID NO: 65038 - protein, 19 aa, Homo sapiens
CATDYSPTGYSNYFWFNYW

SEQ ID NO: 65039 - protein, 15 aa, Homo sapiens
CARDPIWFGGRFDYW

SEQ ID NO: 65040 - protein, 25 aa, Homo sapiens
CARDGNTKELLWFGELPQPGAFDIW

SEQ ID NO: 65041 - protein, 22 aa, Homo sapiens
CAHSGEVYSSGWYSFKYYFDYW

SEQ ID NO: 65042 - protein, 12 aa, Homo sapiens
CATEDTEYFQHW

SEQ ID NO: 65043 - protein, 13 aa, Homo sapiens
CTKDVLAGGLDYW

SEQ ID NO: 65044 - protein, 18 aa, Homo sapiens
CVRSERYCGRTNCYGDFW

SEQ ID NO: 65045 - protein, 17 aa, Homo sapiens
CARDLSGYSTDEYFQHW

SEQ ID NO: 65046 - protein, 17 aa, Homo sapiens
CAKDRPYDYVWGSFDYW

SEQ ID NO: 65047 - protein, 14 aa, Homo sapiens
CAKDYGDYASLDYW

SEQ ID NO: 65048 - protein, 30 aa, Homo sapiens
CARDGPGSHITIFGVVSPPKIYYYYGMDVW

SEQ ID NO: 65049 - protein, 17 aa, Homo sapiens
CAKSSSHAVTTWSFDYW

SEQ ID NO: 65050 - protein, 23 aa, Homo sapiens
CATTRQNKYGFLDGLEGYYMDVW

SEQ ID NO: 65051 - protein, 21 aa, Homo sapiens
CATDLGTVVVPAAIGDAFDIW

SEQ ID NO: 65052 - protein, 23 aa, Homo sapiens
CAKDTASYAWEPQGSLPAVLDYW

SEQ ID NO: 65053 - protein, 23 aa, Homo sapiens
CATLYYDFWSGHSNIQHNWFDPW

SEQ ID NO: 65054 - protein, 20 aa, Homo sapiens
CARINSYYDSGSYSYYMDVW

SEQ ID NO: 65055 - protein, 20 aa, Homo sapiens
CARDPRYCGGDCYGPLNDYW

SEQ ID NO: 65056 - protein, 25 aa, Homo sapiens
CARVETYDFWSGFHPHKYYYYMDVW

SEQ ID NO: 65057 - protein, 17 aa, Homo sapiens
CARHRISGWYGVEVDYW

SEQ ID NO: 65058 - protein, 17 aa, Homo sapiens
CTSSNTYYDFWSGYDYW

SEQ ID NO: 65059 - protein, 20 aa, Homo sapiens
CARPRFFYDSGIGYFYFDYW

SEQ ID NO: 65060 - protein, 19 aa, Homo sapiens
CARDFEESGWYYRYGMDVW

SEQ ID NO: 65061 - protein, 19 aa, Homo sapiens
CARKLYYYDTSDAGWFDPW

SEQ ID NO: 65062 - protein, 23 aa, Homo sapiens
CATLEDYYYDFWSGYSRHYFDYW

SEQ ID NO: 65063 - protein, 20 aa, Homo sapiens
CASIQEDSSGYYYARVFDYW

SEQ ID NO: 65064 - protein, 26 aa, Homo sapiens
CAREVVGYCSSTSCSRLYYYYYMDVW

SEQ ID NO: 65065 - protein, 17 aa, Homo sapiens
CARVQEGYSSGWYPDYW

SEQ ID NO: 65066 - protein, 16 aa, Homo sapiens
CTRGGYRYEDDAFDIW

SEQ ID NO: 65067 - protein, 30 aa, Homo sapiens
CALPILTSEDTAMYYCATSAGDYNPFFDYW

SEQ ID NO: 65068 - protein, 14 aa, Homo sapiens
CAGSGSYYLVVDYW

SEQ ID NO: 65069 - protein, 27 aa, Homo sapiens
CARGVDLAIDYSKAIDYSQPINWFDPW

SEQ ID NO: 65070 - protein, 17 aa, Homo sapiens
CAKLGHYYDSSGYIDYW

SEQ ID NO: 65071 - protein, 13 aa, Homo sapiens
CARRNMYESLDYW

SEQ ID NO: 65072 - protein, 24 aa, Homo sapiens
CASSPRVAPGSWYQDYYYYGMDVW

SEQ ID NO: 65073 - protein, 16 aa, Homo sapiens
CARQPAVGGTDWFDHW

SEQ ID NO: 65074 - protein, 16 aa, Homo sapiens
CARHQYYDRGLYLDYW

SEQ ID NO: 65075 - protein, 20 aa, Homo sapiens
CARGGYSYGYWSPVHYFDYW

SEQ ID NO: 65076 - protein, 20 aa, Homo sapiens
CARALTIFGLNAVSYYFDYW

SEQ ID NO: 65077 - protein, 23 aa, Homo sapiens
CARGLRFLEWLLRVPTAYYFDYW

SEQ ID NO: 65078 - protein, 21 aa, Homo sapiens
CARQVGEAVDKYFYYYYMDVW

SEQ ID NO: 65079 - protein, 14 aa, Homo sapiens
CATYNADLLGFDYW

SEQ ID NO: 65080 - protein, 19 aa, Homo sapiens
CARAILEWLFASTYYMDVW

SEQ ID NO: 65081 - protein, 23 aa, Homo sapiens
CARFGLATVVTLGPVPVDAFDIW

SEQ ID NO: 65082 - protein, 17 aa, Homo sapiens
CAKQEIVFGGNSAQDYW

SEQ ID NO: 65083 - protein, 23 aa, Homo sapiens
CARDSVGYCTSKDCYQLGCFDPW

SEQ ID NO: 65084 - protein, 16 aa, Homo sapiens
CVKDPLTYDSGYDDCW

SEQ ID NO: 65085 - protein, 21 aa, Homo sapiens
CARDANTRRGIVATIGPLDYW

SEQ ID NO: 65086 - protein, 14 aa, Homo sapiens
CLLHYGGLQLAWVF

SEQ ID NO: 65087 - protein, 18 aa, Homo sapiens
CAKVYDFWSGSSYRFDPW

SEQ ID NO: 65088 - protein, 16 aa, Homo sapiens
CVRYHGYNTERYFDLW

SEQ ID NO: 65089 - protein, 15 aa, Homo sapiens
CARHMRESPWYFDLW

SEQ ID NO: 65090 - protein, 19 aa, Homo sapiens
CATDAADNNFGVVITFDYW

SEQ ID NO: 65091 - protein, 15 aa, Homo sapiens
CDVLWNDEIDAFDIW

SEQ ID NO: 65092 - protein, 23 aa, Homo sapiens
CARAVLWVWGAAAAPGGYWFDPW

SEQ ID NO: 65093 - protein, 12 aa, Homo sapiens
CQHRSNWPPWSF

SEQ ID NO: 65094 - protein, 16 aa, Homo sapiens
CAQNTFPDTSGTSDYW

SEQ ID NO: 65095 - protein, 20 aa, Homo sapiens
CAKDSYCSGGSCYSVGFDPW

SEQ ID NO: 65096 - protein, 20 aa, Homo sapiens
CAKDASTASIAPRPWYFDLW

SEQ ID NO: 65097 - protein, 16 aa, Homo sapiens
CTKEDYTSGFSYFDPW

SEQ ID NO: 65098 - protein, 21 aa, Homo sapiens
CARDAGGGAVTRFGRNWFDPW

SEQ ID NO: 65099 - protein, 26 aa, Homo sapiens
CARDLRYYDSSGYYYFVGYYYGMDVW

SEQ ID NO: 65100 - protein, 20 aa, Homo sapiens
CARTLGFCSTGGCRDWFDPW

SEQ ID NO: 65101 - protein, 15 aa, Homo sapiens
CAKERGYDANYFQYW

SEQ ID NO: 65102 - protein, 13 aa, Homo sapiens
CSSHTSGSTFWIF

SEQ ID NO: 65103 - protein, 15 aa, Homo sapiens
CARAPYSWFNRFDPW

SEQ ID NO: 65104 - protein, 23 aa, Homo sapiens
CARDLPPFYDFWSGYANWYFDLW

SEQ ID NO: 65105 - protein, 18 aa, Homo sapiens
CARIGGDMTTVVTPLDYW

SEQ ID NO: 65106 - protein, 18 aa, Homo sapiens
CAREDSFGLVSGWYFDLW

SEQ ID NO: 65107 - protein, 13 aa, Homo sapiens
CAGANNIYYFDYW

SEQ ID NO: 65108 - protein, 21 aa, Homo sapiens
CARDTGVVGADYYYYYGMDVW

SEQ ID NO: 65109 - protein, 19 aa, Homo sapiens
CARDPGGYCSSTSCYTAYW

SEQ ID NO: 65110 - protein, 14 aa, Homo sapiens
CARTRVPTVTLDYW

SEQ ID NO: 65111 - protein, 19 aa, Homo sapiens
CAREEYYDFWSGTGWFDPW

SEQ ID NO: 65112 - protein, 26 aa, Homo sapiens
CATSRHEQYSDYDRVISYYHYAVDVW

SEQ ID NO: 65113 - protein, 14 aa, Homo sapiens
CARMSALGVYLDYW

SEQ ID NO: 65114 - protein, 22 aa, Homo sapiens
CARDRWSPGIAAAGTDQGFDPW

SEQ ID NO: 65115 - protein, 22 aa, Homo sapiens
CARSGQPYDFWRTHTQPYLDFW

SEQ ID NO: 65116 - protein, 18 aa, Homo sapiens
CARDLEAWELLGDAFDIW

SEQ ID NO: 65117 - protein, 21 aa, Homo sapiens
CARDTTVTPHSEYYYYGMDVW

SEQ ID NO: 65118 - protein, 16 aa, Homo sapiens
CARVSRGSDWYRFDYW

SEQ ID NO: 65119 - protein, 31 aa, Homo sapiens
CARLGDSIAGTPYYDFWSGYSFPRGPVFDCW

SEQ ID NO: 65120 - protein, 18 aa, Homo sapiens
CAKEWAQLWRQKGYFDSW

SEQ ID NO: 65121 - protein, 17 aa, Homo sapiens
CTRDQGLSTWTYYMDVW

SEQ ID NO: 65122 - protein, 18 aa, Homo sapiens
CATSMAPVGADRSPIDYW

SEQ ID NO: 65123 - protein, 19 aa, Homo sapiens
CVREKTIFGAVITALFDYW

SEQ ID NO: 65124 - protein, 27 aa, Homo sapiens
CAKMYQVLSSDYDVWSDVNAEGIFDIW

SEQ ID NO: 65125 - protein, 13 aa, Homo sapiens
CQLLPSYPPVVTF

SEQ ID NO: 65126 - protein, 21 aa, Homo sapiens
CAKDIGDEDDYSNLEAAFDIW

SEQ ID NO: 65127 - protein, 20 aa, Homo sapiens
CARPPAHGYYGDYVRLFDVW

SEQ ID NO: 65128 - protein, 21 aa, Homo sapiens
CATDRADSSGYYYVQGGFDYW

SEQ ID NO: 65129 - protein, 16 aa, Homo sapiens
CARKYLGASGVAFDIW

SEQ ID NO: 65130 - protein, 17 aa, Homo sapiens
CAKPLDGYPLYDAFDIW

SEQ ID NO: 65131 - protein, 23 aa, Homo sapiens
CARVDSYYDFWSGPGGWGWFDPW

SEQ ID NO: 65132 - protein, 14 aa, Homo sapiens
CSGGSCYSGGFDPW

SEQ ID NO: 65133 - protein, 16 aa, Homo sapiens
CAKDIGLAARGRYDYW

SEQ ID NO: 65134 - protein, 16 aa, Homo sapiens
CARPVRSLDHWYFDLW

SEQ ID NO: 65135 - protein, 14 aa, Homo sapiens
CAHSPSTLTPFEYW

SEQ ID NO: 65136 - protein, 25 aa, Homo sapiens
CARDQVGSGGYRYSDTAMVGWFDPW

SEQ ID NO: 65137 - protein, 20 aa, Homo sapiens
CARSESSASGSYYIGGFDIW

SEQ ID NO: 65138 - protein, 19 aa, Homo sapiens
CAGLGQGDGYNLGPLSDYW

SEQ ID NO: 65139 - protein, 25 aa, Homo sapiens
CAKDARGYYDFWSGYLNAYNWFDPW

SEQ ID NO: 65140 - protein, 16 aa, Homo sapiens
CAASHSDWALPGLDYW

SEQ ID NO: 65141 - protein, 24 aa, Homo sapiens
CAKDFFKDCSSTSCRYYYYGMDVW

SEQ ID NO: 65142 - protein, 20 aa, Homo sapiens
CAKEDWRIRYSDWLFTFDYW

SEQ ID NO: 65143 - protein, 23 aa, Homo sapiens
CASTNDILTGYSPVGYYYGMDVW

SEQ ID NO: 65144 - protein, 18 aa, Homo sapiens
CTRVEGEGSSSWPTFDYW

SEQ ID NO: 65145 - protein, 27 aa, Homo sapiens
CARAWWRSGNDLPDDSSGYYFYYFDYW

SEQ ID NO: 65146 - protein, 26 aa, Homo sapiens
CARESIRSYCSGGSCYGDYYYGMDVW

SEQ ID NO: 65147 - protein, 14 aa, Homo sapiens
CARGGTMTLVTDYW

SEQ ID NO: 65148 - protein, 24 aa, Homo sapiens
CAKDTGYCSTTGCTPNYYYGMDVW

SEQ ID NO: 65149 - protein, 19 aa, Homo sapiens
CAREYCTPAICHFEAFDIW

SEQ ID NO: 65150 - protein, 21 aa, Homo sapiens
CARVEHDGYYDSYYYYYMDVW

SEQ ID NO: 65151 - protein, 17 aa, Homo sapiens
CARAGSVAARLGFFDPW

SEQ ID NO: 65152 - protein, 13 aa, Homo sapiens
CARSGSSNAFEIW

SEQ ID NO: 65153 - protein, 18 aa, Homo sapiens
CATVPPIRGPGISYFHHW

SEQ ID NO: 65154 - protein, 21 aa, Homo sapiens
CTTDVSYDFWSGYYAPPFDYW

SEQ ID NO: 65155 - protein, 21 aa, Homo sapiens
CAILMVYYYGSGSPRGWFDPW

SEQ ID NO: 65156 - protein, 19 aa, Homo sapiens
CAKPLEYYDFWGTYPFDYW

SEQ ID NO: 65157 - protein, 16 aa, Homo sapiens
CARDRGWELLTWFDPW

SEQ ID NO: 65158 - protein, 20 aa, Homo sapiens
CASMYYDILTGLYYYGMDVW

SEQ ID NO: 65159 - protein, 21 aa, Homo sapiens
CARDRFYYDRSGYPRYYLDSW

SEQ ID NO: 65160 - protein, 20 aa, Homo sapiens
CVRPRYARYDYSDSGPHDYW

SEQ ID NO: 65161 - protein, 16 aa, Homo sapiens
CVRDRMGKFSNWFDPW

SEQ ID NO: 65162 - protein, 20 aa, Homo sapiens
CARQRIVVVPGAPIQYFDSW

SEQ ID NO: 65163 - protein, 14 aa, Homo sapiens
CSSRDSSGDLLGVF

SEQ ID NO: 65164 - protein, 22 aa, Homo sapiens
CARQATLRYFDWLFYPPWVDYW

SEQ ID NO: 65165 - protein, 20 aa, Homo sapiens
CAMRADYDFWSAYNDAFDIW

SEQ ID NO: 65166 - protein, 16 aa, Homo sapiens
CVRHWGSGYYYPFDYW

SEQ ID NO: 65167 - protein, 17 aa, Homo sapiens
CARAKIAAADDALFDYW

SEQ ID NO: 65168 - protein, 19 aa, Homo sapiens
CARDRSGDSPVYYYGMDVW

SEQ ID NO: 65169 - protein, 21 aa, Homo sapiens
CAKLAGYSSGWYGELDTFDIW

SEQ ID NO: 65170 - protein, 17 aa, Homo sapiens
CASNWDRFSGGYYMDVW

SEQ ID NO: 65171 - protein, 17 aa, Homo sapiens
CATPFGPLYGDQDFDYW

SEQ ID NO: 65172 - protein, 20 aa, Homo sapiens
CARALPNYYGPARPYYFDFW

SEQ ID NO: 65173 - protein, 22 aa, Homo sapiens
CTRDYRVDTNLSLRPRTRFDPW

SEQ ID NO: 65174 - protein, 13 aa, Homo sapiens
CQSYDISPRGPVF

SEQ ID NO: 65175 - protein, 16 aa, Homo sapiens
CAKDDGWGWSGYCDHW

SEQ ID NO: 65176 - protein, 24 aa, Homo sapiens
CARVPYVDTAMGWAVGPEYYFDYW

SEQ ID NO: 65177 - protein, 23 aa, Homo sapiens
CAKAEPDRYDFWSGFYTFYFDSW

SEQ ID NO: 65178 - protein, 19 aa, Homo sapiens
CARAFRSGSYYYYYYMDVW

SEQ ID NO: 65179 - protein, 16 aa, Homo sapiens
CAHRPGLIVVDAFDIW

SEQ ID NO: 65180 - protein, 17 aa, Homo sapiens
CAKHTDYFGSGSSSDYW

SEQ ID NO: 65181 - protein, 22 aa, Homo sapiens
CARASRTWTTGPMIVVVIPDYW

SEQ ID NO: 65182 - protein, 23 aa, Homo sapiens
CARDRVYDFWSGKIYYYYYMDVW

SEQ ID NO: 65183 - protein, 15 aa, Homo sapiens
CARHQYDIFDYFHYW

SEQ ID NO: 65184 - protein, 18 aa, Homo sapiens
CARGKSRKQQLVQGLDYW

SEQ ID NO: 65185 - protein, 13 aa, Homo sapiens
CAAESLINYFEKW

SEQ ID NO: 65186 - protein, 17 aa, Homo sapiens
CAKATSSTYYYRAFDIW

SEQ ID NO: 65187 - protein, 18 aa, Homo sapiens
CAKVSYSYGYPASVIDYW

SEQ ID NO: 65188 - protein, 22 aa, Homo sapiens
CARHLISTIFGVAIAYYYMDVW

SEQ ID NO: 65189 - protein, 15 aa, Homo sapiens
CATEWWGGAWLFDLW

SEQ ID NO: 65190 - protein, 17 aa, Homo sapiens
CGRLGAKYSPNPYFDHW

SEQ ID NO: 65191 - protein, 15 aa, Homo sapiens
CARVWGSVHPRFDYW

SEQ ID NO: 65192 - protein, 16 aa, Homo sapiens
CARDRDYGGKRYLEYW

SEQ ID NO: 65193 - protein, 23 aa, Homo sapiens
CAKDIGEGNYYDSSNYYTVFDYW

SEQ ID NO: 65194 - protein, 22 aa, Homo sapiens
CARDFIYGDYASYYYYYGMDVW

SEQ ID NO: 65195 - protein, 23 aa, Homo sapiens
CARDSRVARSGYYTGKFLFFDYW

SEQ ID NO: 65196 - protein, 18 aa, Homo sapiens
CARGDSVDFWTAYYLDYW

SEQ ID NO: 65197 - protein, 23 aa, Homo sapiens
CAREEGGIVVVPAAIWEYYFDYW

SEQ ID NO: 65198 - protein, 14 aa, Homo sapiens
CVEYQLLSGQFDPW

SEQ ID NO: 65199 - protein, 25 aa, Homo sapiens
CAQRGEGRVAPRGGPTFTYYYMDVW

SEQ ID NO: 65200 - protein, 17 aa, Homo sapiens
CAKDLYYYGSGSYPDYW

SEQ ID NO: 65201 - protein, 22 aa, Homo sapiens
CVRGSHLHKIYDTLTGQHFDYW

SEQ ID NO: 65202 - protein, 16 aa, Homo sapiens
CARSWIAVAGLGLDYW

SEQ ID NO: 65203 - protein, 22 aa, Homo sapiens
CARDHEEFDFWSGSRLAGLDYW

SEQ ID NO: 65204 - protein, 13 aa, Homo sapiens
CARLQVAESFDSW

SEQ ID NO: 65205 - protein, 14 aa, Homo sapiens
CARDITTRYYMDVW

SEQ ID NO: 65206 - protein, 22 aa, Homo sapiens
CARYRGYCSSTSCYTGNYFDYW

SEQ ID NO: 65207 - protein, 19 aa, Homo sapiens
CAREDYYGSGSYYVWFDPW

SEQ ID NO: 65208 - protein, 23 aa, Homo sapiens
CARVRLSTIFGVVTRYYYYMDVW

SEQ ID NO: 65209 - protein, 21 aa, Homo sapiens
CARDSVTTVTLDYYYYGMDVW

SEQ ID NO: 65210 - protein, 17 aa, Homo sapiens
CARVLVTTRSDNWFDPW

SEQ ID NO: 65211 - protein, 11 aa, Homo sapiens
CHQTSNLPLAF

SEQ ID NO: 65212 - protein, 19 aa, Homo sapiens
CASSPAYYDFWSGYYNDYW

SEQ ID NO: 65213 - protein, 20 aa, Homo sapiens
CARHEGGWTTAIDRDAFDIW

SEQ ID NO: 65214 - protein, 23 aa, Homo sapiens
CATLSFNGVLSAVRRPDWYFDLW

SEQ ID NO: 65215 - protein, 17 aa, Homo sapiens
CARDPFYDILTGYYIYW

SEQ ID NO: 65216 - protein, 15 aa, Homo sapiens
CATLSVLTTPIRDYW

SEQ ID NO: 65217 - protein, 21 aa, Homo sapiens
CSREGGIFGEVVIRTYYLDVW

SEQ ID NO: 65218 - protein, 25 aa, Homo sapiens
CARVRANSRIVLMVYAISPDAFDIW

SEQ ID NO: 65219 - protein, 22 aa, Homo sapiens
CARSYNYDSNGYSVKDDYFDFW

SEQ ID NO: 65220 - protein, 21 aa, Homo sapiens
CARVATDSSGYFDLPDAYDLW

SEQ ID NO: 65221 - protein, 18 aa, Homo sapiens
CARLNYPLYYDMSAFDIW

SEQ ID NO: 65222 - protein, 20 aa, Homo sapiens
CARLDSSSWYDYYFYYIDVW

SEQ ID NO: 65223 - protein, 14 aa, Homo sapiens
CAHRDSGYDGNDYW

SEQ ID NO: 65224 - protein, 25 aa, Homo sapiens
CAHRPRDNTIFGVVINYQGDYFDYW

SEQ ID NO: 65225 - protein, 18 aa, Homo sapiens
CAKESSRRGIRVGAFDIW

SEQ ID NO: 65226 - protein, 19 aa, Homo sapiens
CAREGVEVYGDYGGAFDIW

SEQ ID NO: 65227 - protein, 21 aa, Homo sapiens
CARETDKWDYDFWKWDWFDPW

SEQ ID NO: 65228 - protein, 22 aa, Homo sapiens
CARLYENDFWSGYYGQSAFDIW

SEQ ID NO: 65229 - protein, 18 aa, Homo sapiens
CARQHVVVVAATGWFDPW

SEQ ID NO: 65230 - protein, 25 aa, Homo sapiens
CARAADDRGYDYDWGRYRYCPFGYW

SEQ ID NO: 65231 - protein, 17 aa, Homo sapiens
CARQRIRWSWGEEFDSW

SEQ ID NO: 65232 - protein, 20 aa, Homo sapiens
CAKDMIIRGGYKYDVAFDVW

SEQ ID NO: 65233 - protein, 16 aa, Homo sapiens
CARVLQGWDRYYFDYW

SEQ ID NO: 65234 - protein, 17 aa, Homo sapiens
CARLLYCGGDCYAFDIW

SEQ ID NO: 65235 - protein, 18 aa, Homo sapiens
CARDLGSSAVYTRALDIW

SEQ ID NO: 65236 - protein, 16 aa, Homo sapiens
CTKAGTIFGVVQFDPW

SEQ ID NO: 65237 - protein, 20 aa, Homo sapiens
CARFKSDFWSGYFPDAFDIW

SEQ ID NO: 65238 - protein, 20 aa, Homo sapiens
CARLALIAAAGSRDDAFDIW

SEQ ID NO: 65239 - protein, 22 aa, Homo sapiens
CARLLEAYHWNENNYYYYMDVW

SEQ ID NO: 65240 - protein, 18 aa, Homo sapiens
CAKDMRWFGDLGDAFDIW

SEQ ID NO: 65241 - protein, 28 aa, Homo sapiens
CARHPRGEPYYDFWSGYLLHGLRYFDLW

SEQ ID NO: 65242 - protein, 18 aa, Homo sapiens
CARGAPNYVDYYYYMDVW

SEQ ID NO: 65243 - protein, 21 aa, Homo sapiens
CATEMESSSRWLPVRLYFAYW

SEQ ID NO: 65244 - protein, 21 aa, Homo sapiens
CARDRAIYATSGYHNHASDIW

SEQ ID NO: 65245 - protein, 17 aa, Homo sapiens
CARDRGTVTGDWSFDLW

SEQ ID NO: 65246 - protein, 22 aa, Homo sapiens
CARDRARTYYYDSSGYYPFDIW

SEQ ID NO: 65247 - protein, 17 aa, Homo sapiens
CASRPKGSRSSGFNDYW

SEQ ID NO: 65248 - protein, 14 aa, Homo sapiens
CANPRGVAREFDVW

SEQ ID NO: 65249 - protein, 18 aa, Homo sapiens
CATLPYLSAARYWYFDLW

SEQ ID NO: 65250 - protein, 17 aa, Homo sapiens
CVKDRASNWQRGPFDSW

SEQ ID NO: 65251 - protein, 18 aa, Homo sapiens
CAKVYWGPHDYGDYIDYW

SEQ ID NO: 65252 - protein, 15 aa, Homo sapiens
CARAESSGWLYFDSW

SEQ ID NO: 65253 - protein, 20 aa, Homo sapiens
CARREAAGPNNHYYYGMDVW

SEQ ID NO: 65254 - protein, 20 aa, Homo sapiens
CARRSYDDYYDTAGGAFDIW

SEQ ID NO: 65255 - protein, 15 aa, Homo sapiens
CAREAAAGPPRFDYW

SEQ ID NO: 65256 - protein, 13 aa, Homo sapiens
CHQRSNWPRGGTF

SEQ ID NO: 65257 - protein, 12 aa, Homo sapiens
CARSNTGIPDYW

SEQ ID NO: 65258 - protein, 19 aa, Homo sapiens
CALKVLRFLEWSSYYMDVW

SEQ ID NO: 65259 - protein, 14 aa, Homo sapiens
CARLLIVGATLDYW

SEQ ID NO: 65260 - protein, 22 aa, Homo sapiens
CAKPSSLAGYSGYGRVPPFDIW

SEQ ID NO: 65261 - protein, 15 aa, Homo sapiens
CATSDEYQLLLFDYW

SEQ ID NO: 65262 - protein, 19 aa, Homo sapiens
CARRREHYFSNYKWWFDYW

SEQ ID NO: 65263 - protein, 17 aa, Homo sapiens
CARHYDTGGFSHHFDYW

SEQ ID NO: 65264 - protein, 15 aa, Homo sapiens
CGRLGYNYGYYVDIW

SEQ ID NO: 65265 - protein, 16 aa, Homo sapiens
CARHVSRELLDGFDIW

SEQ ID NO: 65266 - protein, 13 aa, Homo sapiens
CARIHCGSYRDYW

SEQ ID NO: 65267 - protein, 12 aa, Homo sapiens
CARSIAARPDYW

SEQ ID NO: 65268 - protein, 18 aa, Homo sapiens
CACIAVAAGGASSVLDYW

SEQ ID NO: 65269 - protein, 18 aa, Homo sapiens
CARTYFYQTLRNFYIDYW

SEQ ID NO: 65270 - protein, 19 aa, Homo sapiens
CAKDYDYGDYVFYYGMDVW

SEQ ID NO: 65271 - protein, 17 aa, Homo sapiens
CARDRVDFWNSGYFDYW

SEQ ID NO: 65272 - protein, 18 aa, Homo sapiens
CAKDPGVPAARLYYFDYW

SEQ ID NO: 65273 - protein, 19 aa, Homo sapiens
CARHYHDSTGYYSKPFDYW

SEQ ID NO: 65274 - protein, 21 aa, Homo sapiens
CAKGLLGVDSSGYYLYGMDVW

SEQ ID NO: 65275 - protein, 17 aa, Homo sapiens
CAKAPWGPATLGYFDLW

SEQ ID NO: 65276 - protein, 21 aa, Homo sapiens
CAKALGYYYDSSGYPNAFDIW

SEQ ID NO: 65277 - protein, 18 aa, Homo sapiens
CARDPATVMDYYYYMDVW

SEQ ID NO: 65278 - protein, 16 aa, Homo sapiens
CARVKDTAMVRGFDCW

SEQ ID NO: 65279 - protein, 21 aa, Homo sapiens
CARGTCTSDICYKIGYYLDSW

SEQ ID NO: 65280 - protein, 30 aa, Homo sapiens
CARGKRRITIFGVVITGGPSPYKLGWFDPW

SEQ ID NO: 65281 - protein, 19 aa, Homo sapiens
CSRDRAGAVMGGLGYLDYW

SEQ ID NO: 65282 - protein, 20 aa, Homo sapiens
CARRPAGRIVVVPTYYFDYW

SEQ ID NO: 65283 - protein, 17 aa, Homo sapiens
CTKGSTGSYLGSAFDMW

SEQ ID NO: 65284 - protein, 18 aa, Homo sapiens
CVTVGCGGDCHQSYFDYW

SEQ ID NO: 65285 - protein, 17 aa, Homo sapiens
CASWQFGVVTEYYFDYW

SEQ ID NO: 65286 - protein, 19 aa, Homo sapiens
CGREPYYRAPYYYFGMDVW

SEQ ID NO: 65287 - protein, 18 aa, Homo sapiens
CVHRFPAMLRGKEAFDYW

SEQ ID NO: 65288 - protein, 19 aa, Homo sapiens
CARQSRAYNYGPKAHFDYW

SEQ ID NO: 65289 - protein, 22 aa, Homo sapiens
CARGDFWSGYGSSSYYYYMDVW

SEQ ID NO: 65290 - protein, 18 aa, Homo sapiens
CARSPGLYDTRGTPLDYW

SEQ ID NO: 65291 - protein, 22 aa, Homo sapiens
CARTQIKYYYDSSGYYDWFDPW

SEQ ID NO: 65292 - protein, 17 aa, Homo sapiens
CARGNDYGDFLPRYDYW

SEQ ID NO: 65293 - protein, 18 aa, Homo sapiens
CARDGEYYDSSGYFVDYW

SEQ ID NO: 65294 - protein, 22 aa, Homo sapiens
CATAHPGLRLLNYYYYYYMDVW

SEQ ID NO: 65295 - protein, 22 aa, Homo sapiens
CAKDYIHDSSGYYYVSGYFDYW

SEQ ID NO: 65296 - protein, 16 aa, Homo sapiens
CARIPVATLGPAFDYW

SEQ ID NO: 65297 - protein, 17 aa, Homo sapiens
CARNTIFGVVMDAFDVW

SEQ ID NO: 65298 - protein, 14 aa, Homo sapiens
CASRWLRHQAIDYW

SEQ ID NO: 65299 - protein, 16 aa, Homo sapiens
CARREGQIVRGYFPHW

SEQ ID NO: 65300 - protein, 22 aa, Homo sapiens
CARDMVVPATLNTDYYYYMDVW

SEQ ID NO: 65301 - protein, 21 aa, Homo sapiens
CARLLHSDFWSGYYYNWFDPW

SEQ ID NO: 65302 - protein, 18 aa, Homo sapiens
CARDSSLYSSSKGGFDYW

SEQ ID NO: 65303 - protein, 21 aa, Homo sapiens
CAHSQYTFSLTSAGEYYYDYW

SEQ ID NO: 65304 - protein, 14 aa, Homo sapiens
CARGGGRDGSTDYW

SEQ ID NO: 65305 - protein, 22 aa, Homo sapiens
CARGSLGDCSGGSCYVDAFDVW

SEQ ID NO: 65306 - protein, 20 aa, Homo sapiens
CARRMRGYCSSTSCSQTDYW

SEQ ID NO: 65307 - protein, 14 aa, Homo sapiens
CARDHSSGWIFDYW

SEQ ID NO: 65308 - protein, 16 aa, Homo sapiens
CARVEVAGTEYHFDKW

SEQ ID NO: 65309 - protein, 20 aa, Homo sapiens
CARHYFGSGSYYRGDWFDPW

SEQ ID NO: 65310 - protein, 14 aa, Homo sapiens
CARRVPNAQIFDYW

SEQ ID NO: 65311 - protein, 16 aa, Homo sapiens
CATGWKPRATGAFDIW

SEQ ID NO: 65312 - protein, 16 aa, Homo sapiens
CARVYYYGSGYPFDYW

SEQ ID NO: 65313 - protein, 14 aa, Homo sapiens
CAHRLFDPPYFAYW

SEQ ID NO: 65314 - protein, 22 aa, Homo sapiens
CAKVWARYYYDSSGYQMGFDYW

SEQ ID NO: 65315 - protein, 21 aa, Homo sapiens
CAREATYYDILSGYYPTFDHW

SEQ ID NO: 65316 - protein, 20 aa, Homo sapiens
CAIRYDYVWGSYRYAGRDYW

SEQ ID NO: 65317 - protein, 15 aa, Homo sapiens
CAREHSAARGHFDYW

SEQ ID NO: 65318 - protein, 15 aa, Homo sapiens
CARSVAGLILGFDPW

SEQ ID NO: 65319 - protein, 12 aa, Homo sapiens
CQQTYNAPALTF

SEQ ID NO: 65320 - protein, 11 aa, Homo sapiens
CQQLNGFPLSF

SEQ ID NO: 65321 - protein, 19 aa, Homo sapiens
CARPAYSSSMGSMHYLDHW

SEQ ID NO: 65322 - protein, 16 aa, Homo sapiens
CARVGLPAVNWYFDLW

SEQ ID NO: 65323 - protein, 11 aa, Homo sapiens
CQAWDSTFAIF

SEQ ID NO: 65324 - protein, 15 aa, Homo sapiens
CATRAGALRGTFDIW

SEQ ID NO: 65325 - protein, 21 aa, Homo sapiens
CARGGTLLWTGELSDNAFDLW

SEQ ID NO: 65326 - protein, 13 aa, Homo sapiens
CVVGNSSGQFDYW

SEQ ID NO: 65327 - protein, 19 aa, Homo sapiens
CARGGYSYGFRGGYYMDVW

SEQ ID NO: 65328 - protein, 17 aa, Homo sapiens
CAKDGIFGATHWYFDLW

SEQ ID NO: 65329 - protein, 21 aa, Homo sapiens
CAREVVTMVRGVITAGWFDPW

SEQ ID NO: 65330 - protein, 23 aa, Homo sapiens
CARYLPDIVVVPAAIGGYYFDYW

SEQ ID NO: 65331 - protein, 17 aa, Homo sapiens
CVRADVVGGLILAFDVW

SEQ ID NO: 65332 - protein, 26 aa, Homo sapiens
CAKDIRKIPLRFLEWSTPKFDAFDIW

SEQ ID NO: 65333 - protein, 16 aa, Homo sapiens
CVHSLSCTSATCYDYW

SEQ ID NO: 65334 - protein, 17 aa, Homo sapiens
CATGAGSSSSLDAFDIW

SEQ ID NO: 65335 - protein, 16 aa, Homo sapiens
CATARSSWFPSDFDYW

SEQ ID NO: 65336 - protein, 15 aa, Homo sapiens
CARDQHSFASYLDHW

SEQ ID NO: 65337 - protein, 15 aa, Homo sapiens
CAKDREELRWYFDSW

SEQ ID NO: 65338 - protein, 20 aa, Homo sapiens
CAKDRYTLGEFSSKSGFDYW

SEQ ID NO: 65339 - protein, 19 aa, Homo sapiens
CAKVQGWYSSSSEYYFDYW

SEQ ID NO: 65340 - protein, 25 aa, Homo sapiens
CARVRDPPAGFCSSASCYTGWFDSW

SEQ ID NO: 65341 - protein, 21 aa, Homo sapiens
CARVWHNGGLVYSYYYYMDVW

SEQ ID NO: 65342 - protein, 13 aa, Homo sapiens
CASSGWLEYFHHW

SEQ ID NO: 65343 - protein, 21 aa, Homo sapiens
CARTATLRYFDWSRLNWFDPW

SEQ ID NO: 65344 - protein, 31 aa, Homo sapiens
CARDGWGTEGYCSSTSCSAVKPYYYYYMDVW

SEQ ID NO: 65345 - protein, 15 aa, Homo sapiens
CARHGLTGDQYFDNW

SEQ ID NO: 65346 - protein, 21 aa, Homo sapiens
CARLYYDFWSGYYKGGYFDPW

SEQ ID NO: 65347 - protein, 16 aa, Homo sapiens
CAKEDGPTENYHFDYW

SEQ ID NO: 65348 - protein, 22 aa, Homo sapiens
CARASPYFYDSTGFYLSAFDIW

SEQ ID NO: 65349 - protein, 13 aa, Homo sapiens
CASSRLRDRRDYW

SEQ ID NO: 65350 - protein, 23 aa, Homo sapiens
CARDVYCSSTSCPTYYYYGMDVW

SEQ ID NO: 65351 - protein, 16 aa, Homo sapiens
CARVNYYDSSGYLNYW

SEQ ID NO: 65352 - protein, 23 aa, Homo sapiens
CARDHKYYDSSPYYYVGEYFQHW

SEQ ID NO: 65353 - protein, 20 aa, Homo sapiens
CARHRYDFWSGYYRGTFDYW

SEQ ID NO: 65354 - protein, 20 aa, Homo sapiens
CARPLGDYDFWSGDYYMDVW

SEQ ID NO: 65355 - protein, 20 aa, Homo sapiens
CARTNWNYGGTYKVYYMDVW

SEQ ID NO: 65356 - protein, 15 aa, Homo sapiens
CARGVGSVYYYVPYW

SEQ ID NO: 65357 - protein, 24 aa, Homo sapiens
CASWEGSIAAAGTIWYDYYGMDVW

SEQ ID NO: 65358 - protein, 18 aa, Homo sapiens
CVKDKASVWTHPPVFDYW

SEQ ID NO: 65359 - protein, 17 aa, Homo sapiens
CARHLSLSSSWYDFDYW

SEQ ID NO: 65360 - protein, 18 aa, Homo sapiens
CARNYGYGAVYYFYMDVW

SEQ ID NO: 65361 - protein, 19 aa, Homo sapiens
CASDRHPPHIAVAGTLDYW

SEQ ID NO: 65362 - protein, 11 aa, Homo sapiens
CQEYHSYPYAF

SEQ ID NO: 65363 - protein, 23 aa, Homo sapiens
CARMVGREPTIFGVAANDYFDYW

SEQ ID NO: 65364 - protein, 20 aa, Homo sapiens
CARGTVLSMIVVVIGYFDYW

SEQ ID NO: 65365 - protein, 21 aa, Homo sapiens
CTTDISVVPASYYYYYYMDVW

SEQ ID NO: 65366 - protein, 20 aa, Homo sapiens
CARHGAYWFQSSGYHYPDYW

SEQ ID NO: 65367 - protein, 17 aa, Homo sapiens
CARDEGSIVGAIDFDYW

SEQ ID NO: 65368 - protein, 24 aa, Homo sapiens
CTSTYYYDSSGYFWRGYHDAFDIW

SEQ ID NO: 65369 - protein, 15 aa, Homo sapiens
CARGILYSTPAFDIW

SEQ ID NO: 65370 - protein, 19 aa, Homo sapiens
CARTGLSATGTPGVYRDFW

SEQ ID NO: 65371 - protein, 16 aa, Homo sapiens
CTKDVRPYHDYIFDYW

SEQ ID NO: 65372 - protein, 19 aa, Homo sapiens
CARVTTGTNDGYYYYMDVW

SEQ ID NO: 65373 - protein, 17 aa, Homo sapiens
CARGYFWGSSVGVFDIW

SEQ ID NO: 65374 - protein, 19 aa, Homo sapiens
CARIERDFWSPDSAWFDPW

SEQ ID NO: 65375 - protein, 20 aa, Homo sapiens
CASNTITIFGVVTLPAFDIW

SEQ ID NO: 65376 - protein, 16 aa, Homo sapiens
CWGTSVEVGGQLLDYW

SEQ ID NO: 65377 - protein, 20 aa, Homo sapiens
CAKGSNFWSGYPVNDAFDFW

SEQ ID NO: 65378 - protein, 22 aa, Homo sapiens
CVARQARTGPRDYLAHYYFDYW

SEQ ID NO: 65379 - protein, 20 aa, Homo sapiens
CAAGHYHYDINGYFGAFHIW

SEQ ID NO: 65380 - protein, 23 aa, Homo sapiens
CASRPPTKLYSSGWYGEDYFDYW

SEQ ID NO: 65381 - protein, 18 aa, Homo sapiens
CATLFQRDSLMSGYLDFW

SEQ ID NO: 65382 - protein, 23 aa, Homo sapiens
CARGEVPGDFWTVFYTPEYFQHW

SEQ ID NO: 65383 - protein, 20 aa, Homo sapiens
CARAKVYCGSITCYRWFDPW

SEQ ID NO: 65384 - protein, 12 aa, Homo sapiens
CARDFKAEFDPW

SEQ ID NO: 65385 - protein, 15 aa, Homo sapiens
CARHLHSNYGWFDPW

SEQ ID NO: 65386 - protein, 16 aa, Homo sapiens
CARDKGTVTSSSFDYW

SEQ ID NO: 65387 - protein, 33 aa, Homo sapiens
CALPILRAEDTAVYFCAKDDLAGTTPRGYLDSW

SEQ ID NO: 65388 - protein, 20 aa, Homo sapiens
CAKDLGGDLFGELLNYFDYW

SEQ ID NO: 65389 - protein, 16 aa, Homo sapiens
CAREEGDGDSSDFDYW

SEQ ID NO: 65390 - protein, 15 aa, Homo sapiens
CARVHNYGWYYMDVW

SEQ ID NO: 65391 - protein, 17 aa, Homo sapiens
CASVYYDRLTGYYFSRW

SEQ ID NO: 65392 - protein, 16 aa, Homo sapiens
CARIKAYSYSWYFDFW

SEQ ID NO: 65393 - protein, 18 aa, Homo sapiens
CASASSPLYNSGWYFDYW

SEQ ID NO: 65394 - protein, 21 aa, Homo sapiens
CASLRCADFWSGYNDDAFDIW

SEQ ID NO: 65395 - protein, 18 aa, Homo sapiens
CARDYYDSSGHRDDFDYW

SEQ ID NO: 65396 - protein, 22 aa, Homo sapiens
CARVPYSNYPGGRWYYYYMDVW

SEQ ID NO: 65397 - protein, 14 aa, Homo sapiens
CCSYAGSYTSNWVF

SEQ ID NO: 65398 - protein, 22 aa, Homo sapiens
CAKVGLYSASYFLPTNYYFDYW

SEQ ID NO: 65399 - protein, 19 aa, Homo sapiens
CARVRVFGGRDYYYYMDVW

SEQ ID NO: 65400 - protein, 29 aa, Homo sapiens
CARLQVGSCSTMDCFKGGQYFYYYFMDVW

SEQ ID NO: 65401 - protein, 13 aa, Homo sapiens
CAAWDDSLYSWVF

SEQ ID NO: 65402 - protein, 13 aa, Homo sapiens
CATIGTATIFDYW

SEQ ID NO: 65403 - protein, 17 aa, Homo sapiens
CARAAWGSFLFPYFDDW

SEQ ID NO: 65404 - protein, 22 aa, Homo sapiens
CARVPLWFGELHRGPYNWFDPW

SEQ ID NO: 65405 - protein, 15 aa, Homo sapiens
CAKVDGYNPHAFDIW

SEQ ID NO: 65406 - protein, 15 aa, Homo sapiens
CATEFGVVIMGFDYW

SEQ ID NO: 65407 - protein, 19 aa, Homo sapiens
CARDTRDSSGYYLEPLDYW

SEQ ID NO: 65408 - protein, 14 aa, Homo sapiens
CATDVLGAGAFRVW

SEQ ID NO: 65409 - protein, 18 aa, Homo sapiens
CVKDVHPIVGAGDSFDYW

SEQ ID NO: 65410 - protein, 17 aa, Homo sapiens
CAHRHSTFGVVVTFDNW

SEQ ID NO: 65411 - protein, 17 aa, Homo sapiens
CARDYGDYVPGHAFDIW

SEQ ID NO: 65412 - protein, 16 aa, Homo sapiens
CARSSYSSGWKGFDYW

SEQ ID NO: 65413 - protein, 20 aa, Homo sapiens
CARDRLFGSGAYRNVGFDFW

SEQ ID NO: 65414 - protein, 16 aa, Homo sapiens
CARDHKFGDTPGGDYW

SEQ ID NO: 65415 - protein, 16 aa, Homo sapiens
CRTTVTFDRLKPFDIW

SEQ ID NO: 65416 - protein, 17 aa, Homo sapiens
CASSSPQYYFYYYMDVW

SEQ ID NO: 65417 - protein, 22 aa, Homo sapiens
CARSTDPYYYGSGSYSPGFDPW

SEQ ID NO: 65418 - protein, 16 aa, Homo sapiens
CAKDIGWSGSSQSDYW

SEQ ID NO: 65419 - protein, 18 aa, Homo sapiens
CARVDSSVYTSYWYLRYW

SEQ ID NO: 65420 - protein, 23 aa, Homo sapiens
CAREGRFLEWLLSPYYYYYMDVW

SEQ ID NO: 65421 - protein, 17 aa, Homo sapiens
CAKDPMIVVVSGWFDPW

SEQ ID NO: 65422 - protein, 15 aa, Homo sapiens
CARRGPYDFWNLDYW

SEQ ID NO: 65423 - protein, 11 aa, Homo sapiens
CARSPGTFDSW

SEQ ID NO: 65424 - protein, 19 aa, Homo sapiens
CATAFIPPLWFGKGWFDPW

SEQ ID NO: 65425 - protein, 24 aa, Homo sapiens
CARYYDILTGYYVDYYYYYYMDVW

SEQ ID NO: 65426 - protein, 20 aa, Homo sapiens
CVKDNTYHGYTYGYDGMDVW

SEQ ID NO: 65427 - protein, 19 aa, Homo sapiens
CARDPIIHYDFWSGYFLNW

SEQ ID NO: 65428 - protein, 19 aa, Homo sapiens
CAMPRDYDSSGYHYYLDHW

SEQ ID NO: 65429 - protein, 22 aa, Homo sapiens
CAKGPFLDGGAYYPPVPDFDYW

SEQ ID NO: 65430 - protein, 16 aa, Homo sapiens
CARDRLSVERGQFDFW

SEQ ID NO: 65431 - protein, 15 aa, Homo sapiens
CAKTYDFVWDAINIW

SEQ ID NO: 65432 - protein, 18 aa, Homo sapiens
CARFYFDDYDFYDGMDVW

SEQ ID NO: 65433 - protein, 16 aa, Homo sapiens
CARAGGSTFREPLDYW

SEQ ID NO: 65434 - protein, 26 aa, Homo sapiens
CAREELAPGYCSSTSCHRVGYYMDVW

SEQ ID NO: 65435 - protein, 23 aa, Homo sapiens
CARDLSARDILTGQYYYYGMDVW

SEQ ID NO: 65436 - protein, 16 aa, Homo sapiens
CATTYDSSSSAVFDYW

SEQ ID NO: 65437 - protein, 13 aa, Homo sapiens
CARSQVRHDLDYW

SEQ ID NO: 65438 - protein, 15 aa, Homo sapiens
CAKDDFWSGYSFDYW

SEQ ID NO: 65439 - protein, 24 aa, Homo sapiens
CAILGWNNYDFWSGTYRAHWFDPW

SEQ ID NO: 65440 - protein, 19 aa, Homo sapiens
CTRTKTSLTGLIWFGADYW

SEQ ID NO: 65441 - protein, 20 aa, Homo sapiens
CARGGWLRLGSYYYYGMDVW

SEQ ID NO: 65442 - protein, 19 aa, Homo sapiens
CARVGRSGWRGYYSYIDVW

SEQ ID NO: 65443 - protein, 15 aa, Homo sapiens
CARGGMSGSYEGDYW

SEQ ID NO: 65444 - protein, 18 aa, Homo sapiens
CVVSGSYYHGDHDAFHIW

SEQ ID NO: 65445 - protein, 22 aa, Homo sapiens
CATAGYYDYVWGSYRPQGLDYW

SEQ ID NO: 65446 - protein, 16 aa, Homo sapiens
CATDSSQMGHWYFDLW

SEQ ID NO: 65447 - protein, 21 aa, Homo sapiens
CARAHPNTYYDFWSGSPFDYW

SEQ ID NO: 65448 - protein, 24 aa, Homo sapiens
CAKDMGTGYCSSTSCSNAYVFDYW

SEQ ID NO: 65449 - protein, 21 aa, Homo sapiens
CARGQDPLYYYDSSGYNDDYW

SEQ ID NO: 65450 - protein, 20 aa, Homo sapiens
CAKDLPPFCTSTTCYPPDYW

SEQ ID NO: 65451 - protein, 16 aa, Homo sapiens
CAKDAPSGSYSGFDLW

SEQ ID NO: 65452 - protein, 21 aa, Homo sapiens
CARSGWLHKTGYYYYYYMDVW

SEQ ID NO: 65453 - protein, 14 aa, Homo sapiens
CARIKTGTSLIDYW

SEQ ID NO: 65454 - protein, 18 aa, Homo sapiens
CAKLSVRQLPPNDAFDIW

SEQ ID NO: 65455 - protein, 19 aa, Homo sapiens
CATSLGPHASTPIHYFDYW

SEQ ID NO: 65456 - protein, 27 aa, Homo sapiens
CARDFTVTTSDKPYESTYYYYYGMDVW

SEQ ID NO: 65457 - protein, 21 aa, Homo sapiens
CARDLFPSTYSSSPGLAFDIW

SEQ ID NO: 65458 - protein, 20 aa, Homo sapiens
CARSSVDTAMVPYYYGMDVW

SEQ ID NO: 65459 - protein, 16 aa, Homo sapiens
CARGRSPLLAVYMDVW

SEQ ID NO: 65460 - protein, 12 aa, Homo sapiens
CQQCKSYSGFTF

SEQ ID NO: 65461 - protein, 23 aa, Homo sapiens
CARAGRITIFGVVIGLYNWFDPW

SEQ ID NO: 65462 - protein, 15 aa, Homo sapiens
CARADSRFPPYFDYW

SEQ ID NO: 65463 - protein, 17 aa, Homo sapiens
CARDRQLASHTFNFNYW

SEQ ID NO: 65464 - protein, 23 aa, Homo sapiens
CARGGVESLVVVPAAVPWYFDLW

SEQ ID NO: 65465 - protein, 18 aa, Homo sapiens
CARVKSSSSFRAEYFQHW

SEQ ID NO: 65466 - protein, 19 aa, Homo sapiens
CAKDKNSNYEAYYYGMDVW

SEQ ID NO: 65467 - protein, 18 aa, Homo sapiens
CAITLRGSSWYLPSFDYW

SEQ ID NO: 65468 - protein, 16 aa, Homo sapiens
CVRDRGDPPLHYFDSW

SEQ ID NO: 65469 - protein, 14 aa, Homo sapiens
CASLVTGDPSFDYW

SEQ ID NO: 65470 - protein, 21 aa, Homo sapiens
CARTATPGYRSTWSYWYFDLW

SEQ ID NO: 65471 - protein, 12 aa, Homo sapiens
CATYTNYVLDYW

SEQ ID NO: 65472 - protein, 19 aa, Homo sapiens
CARLSIAAAGLVYWYFDLW

SEQ ID NO: 65473 - protein, 19 aa, Homo sapiens
CARTSMITFGGVIVPFDYW

SEQ ID NO: 65474 - protein, 14 aa, Homo sapiens
CARQRALAADFDYW

SEQ ID NO: 65475 - protein, 18 aa, Homo sapiens
CARENISTRPWTNWFDPW

SEQ ID NO: 65476 - protein, 20 aa, Homo sapiens
CAKRVGPPYDFWSGAYFDYW

SEQ ID NO: 65477 - protein, 21 aa, Homo sapiens
CARDALGYCSGGSCLRGFDPW

SEQ ID NO: 65478 - protein, 17 aa, Homo sapiens
CARILKVPNHMGWFDLW

SEQ ID NO: 65479 - protein, 20 aa, Homo sapiens
CARDRGFLEWSQHDDAFDIW

SEQ ID NO: 65480 - protein, 18 aa, Homo sapiens
CVRWGTRNSNDEYVFDIW

SEQ ID NO: 65481 - protein, 18 aa, Homo sapiens
CAKTISSATGPFYYMDFW

SEQ ID NO: 65482 - protein, 17 aa, Homo sapiens
CASHWDIYGSGSYYTYW

SEQ ID NO: 65483 - protein, 21 aa, Homo sapiens
CARPSPPRSGVVTDYAPFDMW

SEQ ID NO: 65484 - protein, 12 aa, Homo sapiens
CQHFNNWPRSTF

SEQ ID NO: 65485 - protein, 14 aa, Homo sapiens
CAGEHSSSSGFAYW

SEQ ID NO: 65486 - protein, 17 aa, Homo sapiens
CAGGLVGPSGLAMFDPW

SEQ ID NO: 65487 - protein, 20 aa, Homo sapiens
CATGPVVPAALRRLNWFDPW

SEQ ID NO: 65488 - protein, 25 aa, Homo sapiens
CARLGVDPDMVDRAYYYYPYYMDVW

SEQ ID NO: 65489 - protein, 16 aa, Homo sapiens
CARQLFSSSSGTFDFW

SEQ ID NO: 65490 - protein, 19 aa, Homo sapiens
CARGSYDSSGWDMYYFDYW

SEQ ID NO: 65491 - protein, 14 aa, Homo sapiens
CARTVAPNTKIDYW

SEQ ID NO: 65492 - protein, 22 aa, Homo sapiens
CARDRYCSSGSCYRLGDWFDPW

SEQ ID NO: 65493 - protein, 17 aa, Homo sapiens
CARVFTIFGVLDGFDIW

SEQ ID NO: 65494 - protein, 19 aa, Homo sapiens
CARVRLGESNTWHDAFDFW

SEQ ID NO: 65495 - protein, 26 aa, Homo sapiens
CARSQGGDQTWIQLWDIYYYYYMDVW

SEQ ID NO: 65496 - protein, 21 aa, Homo sapiens
CARCLAVAVMFDYYYYGMDVW

SEQ ID NO: 65497 - protein, 26 aa, Homo sapiens
CAREYRAMDDSSGYSSDGYYYGMDVW

SEQ ID NO: 65498 - protein, 21 aa, Homo sapiens
CARVRVYCSGGSCYSLLIDYW

SEQ ID NO: 65499 - protein, 17 aa, Homo sapiens
CASPYSSSWYEGWFDPW

SEQ ID NO: 65500 - protein, 20 aa, Homo sapiens
CARVARGVTTKNSYYYMDVW

SEQ ID NO: 65501 - protein, 16 aa, Homo sapiens
CTRLYYDSSGYLFDYW

SEQ ID NO: 65502 - protein, 15 aa, Homo sapiens
CGTWDSTLSLGQGIF

SEQ ID NO: 65503 - protein, 21 aa, Homo sapiens
CARVAWDYDSSGYYYGYFDLW

SEQ ID NO: 65504 - protein, 17 aa, Homo sapiens
CARAPLFNIVGATVDYW

SEQ ID NO: 65505 - protein, 17 aa, Homo sapiens
CARRSREYGDYVRFDPW

SEQ ID NO: 65506 - protein, 17 aa, Homo sapiens
CVHTAGFWSGYHHFDYW

SEQ ID NO: 65507 - protein, 12 aa, Homo sapiens
CAKDSPEYFQNW

SEQ ID NO: 65508 - protein, 20 aa, Homo sapiens
CARESWGPFGSGNYYNLDYW

SEQ ID NO: 65509 - protein, 15 aa, Homo sapiens
CASSGFFGELSFDYW

SEQ ID NO: 65510 - protein, 23 aa, Homo sapiens
CARCAWEDYYDSGSYRLYAFDIW

SEQ ID NO: 65511 - protein, 21 aa, Homo sapiens
CARVRERYGLGTYYRYYFDYW

SEQ ID NO: 65512 - protein, 19 aa, Homo sapiens
CAKGSQYSSGWYTPGFDYW

SEQ ID NO: 65513 - protein, 17 aa, Homo sapiens
CALPGSWSKGGLFFDYW

SEQ ID NO: 65514 - protein, 17 aa, Homo sapiens
CAKSRPPTVTTFSFDYW

SEQ ID NO: 65515 - protein, 17 aa, Homo sapiens
CARFPPYNDGWEVFDYW

SEQ ID NO: 65516 - protein, 16 aa, Homo sapiens
CARAFYGDHVLTVDYW

SEQ ID NO: 65517 - protein, 24 aa, Homo sapiens
CTTAADYDSSGYYGGYYYYYMDVW

SEQ ID NO: 65518 - protein, 18 aa, Homo sapiens
CARGGYIYNYRPDAFDIW

SEQ ID NO: 65519 - protein, 22 aa, Homo sapiens
CARGSPYDVVWGSYRSDYFDFW

SEQ ID NO: 65520 - protein, 9 aa, Homo sapiens
CTHDYGDHW

SEQ ID NO: 65521 - protein, 19 aa, Homo sapiens
CAHRVREGQWLGLHYFDYW

SEQ ID NO: 65522 - protein, 18 aa, Homo sapiens
CARGYNWNYRSSEAFDIW

SEQ ID NO: 65523 - protein, 15 aa, Homo sapiens
CVRLDWNDIKAFDMW

SEQ ID NO: 65524 - protein, 21 aa, Homo sapiens
CARTGWVVVARAYIYYGMDVW

SEQ ID NO: 65525 - protein, 20 aa, Homo sapiens
CARSLGLTGYYQIPYYFDYW

SEQ ID NO: 65526 - protein, 17 aa, Homo sapiens
CAKDPSGSWYREYFQQW

SEQ ID NO: 65527 - protein, 20 aa, Homo sapiens
CARDHYCSASSCSTYYFDHW

SEQ ID NO: 65528 - protein, 17 aa, Homo sapiens
CARCRLMDNSGYPFDFW

SEQ ID NO: 65529 - protein, 16 aa, Homo sapiens
CARGHWGVGATHFDYW

SEQ ID NO: 65530 - protein, 16 aa, Homo sapiens
CPKAEYTSSWYWFDPW

SEQ ID NO: 65531 - protein, 23 aa, Homo sapiens
CATLDVIVEPPARDPSPDAFEMW

SEQ ID NO: 65532 - protein, 22 aa, Homo sapiens
CARARRYDFWNGYYIHFYFDLW

SEQ ID NO: 65533 - protein, 19 aa, Homo sapiens
CARESAYSSHGSNNWFDPW

SEQ ID NO: 65534 - protein, 34 aa, Homo sapiens
CLRAEDTAVYYCAKESTNYYDSSGYNYGHYFDYW

SEQ ID NO: 65535 - protein, 14 aa, Homo sapiens
CARQSQLLINFDPW

SEQ ID NO: 65536 - protein, 20 aa, Homo sapiens
CAKPSRPGYSSGWYGGLDYW

SEQ ID NO: 65537 - protein, 20 aa, Homo sapiens
CASYPIVVVPAAIIGAFDIW

SEQ ID NO: 65538 - protein, 20 aa, Homo sapiens
CARDRRRGAAAGSREGFDYW

SEQ ID NO: 65539 - protein, 25 aa, Homo sapiens
CARAEPTTIFGVVIGLYYYYGMDVW

SEQ ID NO: 65540 - protein, 20 aa, Homo sapiens
CVRVEYSSSPSYFYHYMDVW

SEQ ID NO: 65541 - protein, 16 aa, Homo sapiens
CARDPPTTGVRSFDYW

SEQ ID NO: 65542 - protein, 23 aa, Homo sapiens
CARDLRGVITLPLGYYYYGMDVW

SEQ ID NO: 65543 - protein, 22 aa, Homo sapiens
CARESATIFGIVILARDAFDIW

SEQ ID NO: 65544 - protein, 22 aa, Homo sapiens
CAKEAGLNSSGYYFALYFFDFW

SEQ ID NO: 65545 - protein, 25 aa, Homo sapiens
CARHGFIEGLSYLYDSSGLPEFDYW

SEQ ID NO: 65546 - protein, 19 aa, Homo sapiens
CAKDDGPGFSSGWTFFDYW

SEQ ID NO: 65547 - protein, 16 aa, Homo sapiens
CAKTRDSDYYWYFDLW

SEQ ID NO: 65548 - protein, 17 aa, Homo sapiens
CAKDMSYTNSPYYFDYW

SEQ ID NO: 65549 - protein, 23 aa, Homo sapiens
CALSIFYYDILTGHPGGNWFDPW

SEQ ID NO: 65550 - protein, 19 aa, Homo sapiens
CARDRDFWSGYTSGWFDPW

SEQ ID NO: 65551 - protein, 14 aa, Homo sapiens
CARAELGNEAFDMW

SEQ ID NO: 65552 - protein, 15 aa, Homo sapiens
CARVRIAAAIAFDIW

SEQ ID NO: 65553 - protein, 17 aa, Homo sapiens
CAKSLLGSPIFDVFDIW

SEQ ID NO: 65554 - protein, 20 aa, Homo sapiens
CAKDTETGDSSSYEGGFDYW

SEQ ID NO: 65555 - protein, 20 aa, Homo sapiens
CTKRLLRERAGTQDDAFDMW

SEQ ID NO: 65556 - protein, 24 aa, Homo sapiens
CARDRGYSYGYQGSHYYYYGMDVW

SEQ ID NO: 65557 - protein, 19 aa, Homo sapiens
CAKVRDYDWLLRSDSFDVW

SEQ ID NO: 65558 - protein, 13 aa, Homo sapiens
CARRRGGDCLDYW

SEQ ID NO: 65559 - protein, 19 aa, Homo sapiens
CARRLGFINSWVSQYFDLW

SEQ ID NO: 65560 - protein, 21 aa, Homo sapiens
CANGLYSNLRPGYYYYGMDVW

SEQ ID NO: 65561 - protein, 20 aa, Homo sapiens
CAKDPYCSSTSCWEDAFDIW

SEQ ID NO: 65562 - protein, 14 aa, Homo sapiens
CQYYDKLPPPLYTF

SEQ ID NO: 65563 - protein, 26 aa, Homo sapiens
CTTVFAYEQQNVDIVATILGYGFDYW

SEQ ID NO: 65564 - protein, 22 aa, Homo sapiens
CARDGGSGPPRGYYFYYFMDVW

SEQ ID NO: 65565 - protein, 21 aa, Homo sapiens
CARGGVIDRNVDIVTTFLDYW

SEQ ID NO: 65566 - protein, 22 aa, Homo sapiens
CARHLLRFLEWLSPRDNWFDPW

SEQ ID NO: 65567 - protein, 22 aa, Homo sapiens
CARGGRYCSGGACYSTGYFQHW

SEQ ID NO: 65568 - protein, 18 aa, Homo sapiens
CGRDRGTVAAANLGMDYW

SEQ ID NO: 65569 - protein, 17 aa, Homo sapiens
CARDRIAPGGHRAFDVW

SEQ ID NO: 65570 - protein, 22 aa, Homo sapiens
CAKDREYCSSYGCYSTFYFDSW

SEQ ID NO: 65571 - protein, 17 aa, Homo sapiens
CARDRDRNWNEYYFDYW

SEQ ID NO: 65572 - protein, 21 aa, Homo sapiens
CATVPRADIVATILWNYFDYW

SEQ ID NO: 65573 - protein, 17 aa, Homo sapiens
CAREKATMIVVGPFDYW

SEQ ID NO: 65574 - protein, 17 aa, Homo sapiens
CVRENYDFWSGAPFDPW

SEQ ID NO: 65575 - protein, 25 aa, Homo sapiens
CARVPWRPYCSRESCYSQYNWFDPW

SEQ ID NO: 65576 - protein, 24 aa, Homo sapiens
CAKDLGPYYDFWSGPKPLYYFDYW

SEQ ID NO: 65577 - protein, 23 aa, Homo sapiens
CAKGSISVIEVAGPTHYWYFDLW

SEQ ID NO: 65578 - protein, 21 aa, Homo sapiens
CAQIQKHYDNNGYFHGYFDVW

SEQ ID NO: 65579 - protein, 23 aa, Homo sapiens
CARNGGERITIFGVVIISAFDIW

SEQ ID NO: 65580 - protein, 19 aa, Homo sapiens
CARWDYYYDSSGYQNYDYW

SEQ ID NO: 65581 - protein, 19 aa, Homo sapiens
CARHGRSWYEMGNNWFDPW

SEQ ID NO: 65582 - protein, 20 aa, Homo sapiens
CATDRGGEGILPYYYYMDVW

SEQ ID NO: 65583 - protein, 17 aa, Homo sapiens
CARPLTRYSGYAEFDYW

SEQ ID NO: 65584 - protein, 23 aa, Homo sapiens
CARVRVNGWELLHPGLGDWFDPW

SEQ ID NO: 65585 - protein, 18 aa, Homo sapiens
CARRLLVAPAADPSFDIW

SEQ ID NO: 65586 - protein, 21 aa, Homo sapiens
CTKDANFYDSRGYTTKYFLHW

SEQ ID NO: 65587 - protein, 17 aa, Homo sapiens
CARHESSSWLLAYFDYW

SEQ ID NO: 65588 - protein, 18 aa, Homo sapiens
CARLFRTEGVTTPVFDYW

SEQ ID NO: 65589 - protein, 13 aa, Homo sapiens
CIVGPRTYAFDVW

SEQ ID NO: 65590 - protein, 17 aa, Homo sapiens
CARDYSSSWSENAFDIW

SEQ ID NO: 65591 - protein, 18 aa, Homo sapiens
CAKDKVGTVGANAAFDIW

SEQ ID NO: 65592 - protein, 24 aa, Homo sapiens
CARGSKGYYDILTGYYIGSGLDYW

SEQ ID NO: 65593 - protein, 17 aa, Homo sapiens
CARDNSMTKTNWHFDLW

SEQ ID NO: 65594 - protein, 12 aa, Homo sapiens
CQQYSSFSSYSF

SEQ ID NO: 65595 - protein, 21 aa, Homo sapiens
CTKSASIFDDTVRSGHYFDSW

SEQ ID NO: 65596 - protein, 20 aa, Homo sapiens
CAHRRGCTNGVCFGGSFDPW

SEQ ID NO: 65597 - protein, 14 aa, Homo sapiens
CQVFNIYPQGPITF

SEQ ID NO: 65598 - protein, 18 aa, Homo sapiens
CAKGRHFLEWLLYYFDSW

SEQ ID NO: 65599 - protein, 13 aa, Homo sapiens
CVKDRSGYPFDYW

SEQ ID NO: 65600 - protein, 27 aa, Homo sapiens
CARDPSTHYCSADGCHPSPRQRYFDYW

SEQ ID NO: 65601 - protein, 19 aa, Homo sapiens
CARSTYYIIAAAETVFDYW

SEQ ID NO: 65602 - protein, 25 aa, Homo sapiens
CARAPESLRIAILRGDSVGGAFDIW

SEQ ID NO: 65603 - protein, 14 aa, Homo sapiens
CAREPYGGYGFDYW

SEQ ID NO: 65604 - protein, 15 aa, Homo sapiens
CAKHLREGRPLFDFW

SEQ ID NO: 65605 - protein, 14 aa, Homo sapiens
CQSADTRGPPEVIF

SEQ ID NO: 65606 - protein, 15 aa, Homo sapiens
CARSSGSSCYELDYW

SEQ ID NO: 65607 - protein, 18 aa, Homo sapiens
CARPGPLLYYSWYYFDYW

SEQ ID NO: 65608 - protein, 19 aa, Homo sapiens
CAKVSLYGDYSFTEPFDMW

SEQ ID NO: 65609 - protein, 25 aa, Homo sapiens
CARRGRLYYDFWSGYYTGVDAFDIW

SEQ ID NO: 65610 - protein, 17 aa, Homo sapiens
CVRDTFQYYRRGAFDMW

SEQ ID NO: 65611 - protein, 17 aa, Homo sapiens
CARDRWGITMIRGIDYW

SEQ ID NO: 65612 - protein, 14 aa, Homo sapiens
CARGEGSTEAFDLW

SEQ ID NO: 65613 - protein, 17 aa, Homo sapiens
CAKNLGAYYFWNYFDYW

SEQ ID NO: 65614 - protein, 17 aa, Homo sapiens
CARVLWPHSYALWFDPW

SEQ ID NO: 65615 - protein, 12 aa, Homo sapiens
CARIPPASEDYW

SEQ ID NO: 65616 - protein, 17 aa, Homo sapiens
CTKDPYSSGWLDTFDIW

SEQ ID NO: 65617 - protein, 18 aa, Homo sapiens
CAREGGEKDGYNSGFDYW

SEQ ID NO: 65618 - protein, 22 aa, Homo sapiens
CARSRDIVVVVAAQHRYYFDYW

SEQ ID NO: 65619 - protein, 17 aa, Homo sapiens
CAHSRLRFLEWLLFDYW

SEQ ID NO: 65620 - protein, 17 aa, Homo sapiens
CARVGYSYATENWFDPW

SEQ ID NO: 65621 - protein, 21 aa, Homo sapiens
CAADGRQYYFDSRGEKNFDYW

SEQ ID NO: 65622 - protein, 20 aa, Homo sapiens
CARHRITFGGVIVHDAFDIW

SEQ ID NO: 65623 - protein, 13 aa, Homo sapiens
CARENTTGYPDYW

SEQ ID NO: 65624 - protein, 21 aa, Homo sapiens
CAREVRDGYNYAADYWYFDLW

SEQ ID NO: 65625 - protein, 17 aa, Homo sapiens
CARFVDFWSGPHYLDYW

SEQ ID NO: 65626 - protein, 22 aa, Homo sapiens
CARRVRDITIFGVVTRDAFDIW

SEQ ID NO: 65627 - protein, 12 aa, Homo sapiens
CQQYGHLPPFAF

SEQ ID NO: 65628 - protein, 15 aa, Homo sapiens
CAKDPPLLEWLFDYW

SEQ ID NO: 65629 - protein, 23 aa, Homo sapiens
CARDGRYCSSTSCPGTRNWFDPW

SEQ ID NO: 65630 - protein, 20 aa, Homo sapiens
CARLTQLTSRKNYYYYMDVW

SEQ ID NO: 65631 - protein, 22 aa, Homo sapiens
CAKTPGMYYYDNSGYSHSFDYW

SEQ ID NO: 65632 - protein, 16 aa, Homo sapiens
CARDSSFGVVIIFDYW

SEQ ID NO: 65633 - protein, 29 aa, Homo sapiens
CARETYHPDYYGSGSSSMRIYYYYGMDVW

SEQ ID NO: 65634 - protein, 15 aa, Homo sapiens
CAYRILGLIPYFDSW

SEQ ID NO: 65635 - protein, 22 aa, Homo sapiens
CATDQFLEWLHDDYYYYYMDVW

SEQ ID NO: 65636 - protein, 16 aa, Homo sapiens
CAIVDFNGWGSYTDYW

SEQ ID NO: 65637 - protein, 15 aa, Homo sapiens
CQVWESSSDHIHVIF

SEQ ID NO: 65638 - protein, 16 aa, Homo sapiens
CAKGGYPVIEYYFDYW

SEQ ID NO: 65639 - protein, 17 aa, Homo sapiens
CARDAYKTGEFSWFGPW

SEQ ID NO: 65640 - protein, 20 aa, Homo sapiens
CARPLGRHSSELYLDGFDVW

SEQ ID NO: 65641 - protein, 17 aa, Homo sapiens
CTRSEISLARSWYFDLW

SEQ ID NO: 65642 - protein, 23 aa, Homo sapiens
CAREHTEYSRADSYYFYLYMDVW

SEQ ID NO: 65643 - protein, 19 aa, Homo sapiens
CARVRGYSNYYYYYYMDVW

SEQ ID NO: 65644 - protein, 18 aa, Homo sapiens
CASPRSYYYDSSGLFDYW

SEQ ID NO: 65645 - protein, 31 aa, Homo sapiens
CAKSRGGSGNGDPFRALISLSSGRAWYFDRW

SEQ ID NO: 65646 - protein, 18 aa, Homo sapiens
CARTYSSANYYYYYMDVW

SEQ ID NO: 65647 - protein, 18 aa, Homo sapiens
CVRGSPLRFLEWTAPDYW

SEQ ID NO: 65648 - protein, 14 aa, Homo sapiens
CVRYCSGGSCFDYW

SEQ ID NO: 65649 - protein, 19 aa, Homo sapiens
CARNPANYYDGSGTAFDIW

SEQ ID NO: 65650 - protein, 22 aa, Homo sapiens
CARDYGWGIAARPSYYYYMDVW

SEQ ID NO: 65651 - protein, 18 aa, Homo sapiens
CAKDSTLYDSSGYSFDYW

SEQ ID NO: 65652 - protein, 18 aa, Homo sapiens
CARVERLLGWNYGAFDIW

SEQ ID NO: 65653 - protein, 23 aa, Homo sapiens
CTRAMSITIFRPHKYYYYYMDVW

SEQ ID NO: 65654 - protein, 17 aa, Homo sapiens
CAKSWQQQLVDPTFDYW

SEQ ID NO: 65655 - protein, 17 aa, Homo sapiens
CARIAVAGTGSLGFDPW

SEQ ID NO: 65656 - protein, 17 aa, Homo sapiens
CARGYDFWSGYSYFDFW

SEQ ID NO: 65657 - protein, 27 aa, Homo sapiens
CAKDPMSKYDFWSGYYVQHLSYYFDYW

SEQ ID NO: 65658 - protein, 19 aa, Homo sapiens
CARRGSALADTGDNPFDYW

SEQ ID NO: 65659 - protein, 17 aa, Homo sapiens
CARMKYGSGYTDAFDIW

SEQ ID NO: 65660 - protein, 17 aa, Homo sapiens
CSQHRTMIVGAEYFQHW

SEQ ID NO: 65661 - protein, 16 aa, Homo sapiens
CARDREGALPGTLDYW

SEQ ID NO: 65662 - protein, 20 aa, Homo sapiens
CARDAWGGVLGGPLNWFDPW

SEQ ID NO: 65663 - protein, 22 aa, Homo sapiens
CARHLGGLGKQWLVRLFEFDYW

SEQ ID NO: 65664 - protein, 14 aa, Homo sapiens
CAIQLWLRGAFDIW

SEQ ID NO: 65665 - protein, 17 aa, Homo sapiens
CTRVPHDYGNYAYPDYW

SEQ ID NO: 65666 - protein, 18 aa, Homo sapiens
CARAHTIFSHYYHYMDVW

SEQ ID NO: 65667 - protein, 21 aa, Homo sapiens
CARDYGGNYSRALALWALDIW

SEQ ID NO: 65668 - protein, 21 aa, Homo sapiens
CARDRDYYDSSGHPYYYMDVW

SEQ ID NO: 65669 - protein, 17 aa, Homo sapiens
CARHVIPDETYSWFDPW

SEQ ID NO: 65670 - protein, 25 aa, Homo sapiens
CARGRGYYDSSDYNREYYYYGLDVW

SEQ ID NO: 65671 - protein, 21 aa, Homo sapiens
CARAVYVSSWFSRLTYYFDYW

SEQ ID NO: 65672 - protein, 18 aa, Homo sapiens
CARHSSFFMTTVTKFDYW

SEQ ID NO: 65673 - protein, 10 aa, Homo sapiens
CSGLFALDVW

SEQ ID NO: 65674 - protein, 15 aa, Homo sapiens
CASSPFYPRWYFDPW

SEQ ID NO: 65675 - protein, 15 aa, Homo sapiens
CAKGVNWGSWYFDLW

SEQ ID NO: 65676 - protein, 17 aa, Homo sapiens
CAKKTRPYGLVDVLDVW

SEQ ID NO: 65677 - protein, 18 aa, Homo sapiens
CAKVDSSWYNNYYAMDVW

SEQ ID NO: 65678 - protein, 24 aa, Homo sapiens
CARRRSPRDCSGANCYFYYYFDIW

SEQ ID NO: 65679 - protein, 21 aa, Homo sapiens
CARGVRRVAIWSGYHYYFDYW

SEQ ID NO: 65680 - protein, 18 aa, Homo sapiens
CAREGEYSYGSFRALDYW

SEQ ID NO: 65681 - protein, 17 aa, Homo sapiens
CAGVQVWMSPAYYFDSW

SEQ ID NO: 65682 - protein, 18 aa, Homo sapiens
CAHTTYAGYKYDDCFDIW

SEQ ID NO: 65683 - protein, 16 aa, Homo sapiens
CASPGRPLTVEGFDFW

SEQ ID NO: 65684 - protein, 15 aa, Homo sapiens
CAHTYFLAGYYFDYW

SEQ ID NO: 65685 - protein, 20 aa, Homo sapiens
CARDLDYGQNYGKTWYLDVW

SEQ ID NO: 65686 - protein, 23 aa, Homo sapiens
CARDGQPSFRGPQTYFYYYMDVW

SEQ ID NO: 65687 - protein, 18 aa, Homo sapiens
CARDSGYDYVWGSYFGYW

SEQ ID NO: 65688 - protein, 16 aa, Homo sapiens
CARGGGKPANRFFDYW

SEQ ID NO: 65689 - protein, 14 aa, Homo sapiens
CATLTTVLTPFDYW

SEQ ID NO: 65690 - protein, 16 aa, Homo sapiens
CARNSGWYLGGAFDIW

SEQ ID NO: 65691 - protein, 19 aa, Homo sapiens
CARDLWDQGYSAYDGFDCW

SEQ ID NO: 65692 - protein, 22 aa, Homo sapiens
CARQGAGVLRFSDGWHYWFDPW

SEQ ID NO: 65693 - protein, 16 aa, Homo sapiens
CAKDAWPTPLTLFDYW

SEQ ID NO: 65694 - protein, 16 aa, Homo sapiens
CTTDAWGGSSWKTDYW

SEQ ID NO: 65695 - protein, 15 aa, Homo sapiens
CARLGSGSYYVLDYW

SEQ ID NO: 65696 - protein, 17 aa, Homo sapiens
CAKDAGSGVSSPWLDSW

SEQ ID NO: 65697 - protein, 16 aa, Homo sapiens
CARDVDPWTNNGVDYW

SEQ ID NO: 65698 - protein, 17 aa, Homo sapiens
CARDKQWSGFNGPFDYW

SEQ ID NO: 65699 - protein, 19 aa, Homo sapiens
CATTEGGSLTGQPIFLDYW

SEQ ID NO: 65700 - protein, 16 aa, Homo sapiens
CSRDSASPASPVDDYW

SEQ ID NO: 65701 - protein, 17 aa, Homo sapiens
CARHRWTTYYFYYMDVW

SEQ ID NO: 65702 - protein, 16 aa, Homo sapiens
CATASAMVTGSWFDPW

SEQ ID NO: 65703 - protein, 19 aa, Homo sapiens
CARLDGDASGNYSPLFDDW

SEQ ID NO: 65704 - protein, 26 aa, Homo sapiens
CARCGWAHCSSTSCSLDYYYYYMDVW

SEQ ID NO: 65705 - protein, 21 aa, Homo sapiens
CARSDITFRLGESSLAPLDYW

SEQ ID NO: 65706 - protein, 14 aa, Homo sapiens
CASEADFADVFDIW

SEQ ID NO: 65707 - protein, 18 aa, Homo sapiens
CARANPPGRGVVDGMDVW

SEQ ID NO: 65708 - protein, 20 aa, Homo sapiens
CTREVNFVWGSSTPPLFDPW

SEQ ID NO: 65709 - protein, 19 aa, Homo sapiens
CARHVPLFWELPADRFDYW

SEQ ID NO: 65710 - protein, 11 aa, Homo sapiens
CASRSDALNVW

SEQ ID NO: 65711 - protein, 19 aa, Homo sapiens
CARYSHCNGGACSSHFDYW

SEQ ID NO: 65712 - protein, 17 aa, Homo sapiens
CARVPDGDYRGYAFDVW

SEQ ID NO: 65713 - protein, 21 aa, Homo sapiens
CARVGARCRSTSCYTGDFDYW

SEQ ID NO: 65714 - protein, 20 aa, Homo sapiens
CARDRPIFIAGYYYYGMDVW

SEQ ID NO: 65715 - protein, 19 aa, Homo sapiens
CARIHSSITVPGTFYFDYW

SEQ ID NO: 65716 - protein, 22 aa, Homo sapiens
CIPSGDIVVVVAATEERVFDYW

SEQ ID NO: 65717 - protein, 22 aa, Homo sapiens
CATDRVGPQRLGELSLLGFDPW

SEQ ID NO: 65718 - protein, 18 aa, Homo sapiens
CARDPSIGWALAVGLDYW

SEQ ID NO: 65719 - protein, 19 aa, Homo sapiens
CARERGSDNWNDRDAFDIW

SEQ ID NO: 65720 - protein, 19 aa, Homo sapiens
CAKDPHRLSCSGSACFDSW

SEQ ID NO: 65721 - protein, 16 aa, Homo sapiens
CARASSTAASYYFDYW

SEQ ID NO: 65722 - protein, 17 aa, Homo sapiens
CARGVTGTINYHYMDVW

SEQ ID NO: 65723 - protein, 25 aa, Homo sapiens
CAHTSQDYNILTGYYFLEPGAFDIW

SEQ ID NO: 65724 - protein, 18 aa, Homo sapiens
CARESRADYGDNNWFDPW

SEQ ID NO: 65725 - protein, 15 aa, Homo sapiens
CAREYKGTVTILDYW

SEQ ID NO: 65726 - protein, 15 aa, Homo sapiens
CARVWLAPHNWFDPW

SEQ ID NO: 65727 - protein, 21 aa, Homo sapiens
CATDHIHSYDFWSGYYIDDYW

SEQ ID NO: 65728 - protein, 17 aa, Homo sapiens
CATIPYQLLLLIYFDYW

SEQ ID NO: 65729 - protein, 22 aa, Homo sapiens
CARLTTPTTVTTGYYYYGMDVW

SEQ ID NO: 65730 - protein, 21 aa, Homo sapiens
CARDGSVTPAADYYYYGMDVW

SEQ ID NO: 65731 - protein, 17 aa, Homo sapiens
CTALVVFCSPSSCLDYW

SEQ ID NO: 65732 - protein, 19 aa, Homo sapiens
CASSDGDSRYYYYYGMDVW

SEQ ID NO: 65733 - protein, 18 aa, Homo sapiens
CVKDRHSAYDYRSSFDFW

SEQ ID NO: 65734 - protein, 19 aa, Homo sapiens
CARDGSGIIPGGVGGFDHW

SEQ ID NO: 65735 - protein, 16 aa, Homo sapiens
CARHLAVAGDEYFQPW

SEQ ID NO: 65736 - protein, 25 aa, Homo sapiens
CARDQSEYYYDSSGEVLPNNWFDPW

SEQ ID NO: 65737 - protein, 17 aa, Homo sapiens
CARGGLNVSGVITHDYW

SEQ ID NO: 65738 - protein, 21 aa, Homo sapiens
CARDYLIVGPAAMRGEHFDYW

SEQ ID NO: 65739 - protein, 25 aa, Homo sapiens
CAKGKRGLITIFGVVTDGAEYFQHW

SEQ ID NO: 65740 - protein, 17 aa, Homo sapiens
CARDNRMQLWPYLFDTW

SEQ ID NO: 65741 - protein, 20 aa, Homo sapiens
CARGDVEMATIFPSYYFDYW

SEQ ID NO: 65742 - protein, 16 aa, Homo sapiens
CARQSKKAAGTNFDYW

SEQ ID NO: 65743 - protein, 17 aa, Homo sapiens
CARALWVGDLYYAFDIW

SEQ ID NO: 65744 - protein, 24 aa, Homo sapiens
CAREGVSLSHSGSGSGINKYFDYW

SEQ ID NO: 65745 - protein, 14 aa, Homo sapiens
CVTTDYPTDAFDMW

SEQ ID NO: 65746 - protein, 21 aa, Homo sapiens
CARTPPAGYSSSWSYWYFDLW

SEQ ID NO: 65747 - protein, 14 aa, Homo sapiens
CAKTSTSRPPWDYW

SEQ ID NO: 65748 - protein, 17 aa, Homo sapiens
CAKDYSSGWYGDAFDSW

SEQ ID NO: 65749 - protein, 24 aa, Homo sapiens
CARGYGKGVSWHWFGYYYYGMDVW

SEQ ID NO: 65750 - protein, 21 aa, Homo sapiens
CARENIVVVLLDYYYYGMDVW

SEQ ID NO: 65751 - protein, 16 aa, Homo sapiens
CVREGTAEAGDAFDMW

SEQ ID NO: 65752 - protein, 20 aa, Homo sapiens
CARVDVSYDSSGYLEVFDYW

SEQ ID NO: 65753 - protein, 16 aa, Homo sapiens
CQQYYSSPSLTFGVTF

SEQ ID NO: 65754 - protein, 19 aa, Homo sapiens
CARIRWELLAGYYYGMDVW

SEQ ID NO: 65755 - protein, 27 aa, Homo sapiens
CARGSSSVGAALGWWGRQFKGNWFDPW

SEQ ID NO: 65756 - protein, 17 aa, Homo sapiens
CAKAPNDYGGYPYFDSW

SEQ ID NO: 65757 - protein, 24 aa, Homo sapiens
CAKDVQAVAGTAGDYYYYYGMDVW

SEQ ID NO: 65758 - protein, 20 aa, Homo sapiens
CARRQTYYFDTSGYWVFDNW

SEQ ID NO: 65759 - protein, 15 aa, Homo sapiens
CAKLRSNPRDYFDYW

SEQ ID NO: 65760 - protein, 20 aa, Homo sapiens
CAHTGYYYDASGSHYHFDYW

SEQ ID NO: 65761 - protein, 19 aa, Homo sapiens
CARGSPSYSRSWGGAFDVW

SEQ ID NO: 65762 - protein, 24 aa, Homo sapiens
CARESSTYYYDSSGYYGPYSIDYW

SEQ ID NO: 65763 - protein, 22 aa, Homo sapiens
CAHTGGTLDHSAGYYSYYFDSW

SEQ ID NO: 65764 - protein, 20 aa, Homo sapiens
CAKGGYDTSGPIGSYCFDYW

SEQ ID NO: 65765 - protein, 18 aa, Homo sapiens
CASTPPFACTTCYYMDVW

SEQ ID NO: 65766 - protein, 17 aa, Homo sapiens
CARIRMTDTGLALFDYW

SEQ ID NO: 65767 - protein, 13 aa, Homo sapiens
CARVRGGWAPDYW

SEQ ID NO: 65768 - protein, 19 aa, Homo sapiens
CARQSGGSLVRAADSFDVW

SEQ ID NO: 65769 - protein, 17 aa, Homo sapiens
CATDRRPRIAVAILDYW

SEQ ID NO: 65770 - protein, 10 aa, Homo sapiens
CMQSIQFRGF

SEQ ID NO: 65771 - protein, 17 aa, Homo sapiens
CARSGGAVTTNYWFDPW

SEQ ID NO: 65772 - protein, 23 aa, Homo sapiens
CAKAAGITIFGVVIPPYYYMDVW

SEQ ID NO: 65773 - protein, 20 aa, Homo sapiens
CARLEGEVGGWYHPTYFDYW

SEQ ID NO: 65774 - protein, 15 aa, Homo sapiens
CARAYTYNWHWFGPW

SEQ ID NO: 65775 - protein, 18 aa, Homo sapiens
CARTGDGTNGSGSYGRYW

SEQ ID NO: 65776 - protein, 19 aa, Homo sapiens
CARDHRWGSGWYTSPLDYW

SEQ ID NO: 65777 - protein, 17 aa, Homo sapiens
CARGITIFGVVDTIDYW

SEQ ID NO: 65778 - protein, 20 aa, Homo sapiens
CVRDSTKFLFLIYYDRLDVW

SEQ ID NO: 65779 - protein, 21 aa, Homo sapiens
CAHRFDAYDSSGYYYNLFDYW

SEQ ID NO: 65780 - protein, 18 aa, Homo sapiens
CARDGSGWATCCGWFDSW

SEQ ID NO: 65781 - protein, 14 aa, Homo sapiens
CARTQASVAAIDYW

SEQ ID NO: 65782 - protein, 17 aa, Homo sapiens
CAKASGWYVVLESPDYW

SEQ ID NO: 65783 - protein, 14 aa, Homo sapiens
CARISIPRVTIDYW

SEQ ID NO: 65784 - protein, 21 aa, Homo sapiens
CTRDGEPRIHLWSSHRDFAYW

SEQ ID NO: 65785 - protein, 19 aa, Homo sapiens
CAREYCTTTSCYPNWFDPW

SEQ ID NO: 65786 - protein, 19 aa, Homo sapiens
CARDPLEITMIGSDAFDIW

SEQ ID NO: 65787 - protein, 24 aa, Homo sapiens
CARAIVVVPAATETNYYYYGMDVW

SEQ ID NO: 65788 - protein, 25 aa, Homo sapiens
CARAGGDWYTGGWSGLHYYYGMDVW

SEQ ID NO: 65789 - protein, 19 aa, Homo sapiens
CATDRCSGGSCYSGSFDYW

SEQ ID NO: 65790 - protein, 21 aa, Homo sapiens
CARDLQYYDFWHGAGGYFDYW

SEQ ID NO: 65791 - protein, 24 aa, Homo sapiens
CAGPSLRYFDWLLFGVDYYYMDVW

SEQ ID NO: 65792 - protein, 22 aa, Homo sapiens
CARHPRAVYDFWSAYLGYFDYW

SEQ ID NO: 65793 - protein, 14 aa, Homo sapiens
CARTAVEWWNFDYW

SEQ ID NO: 65794 - protein, 14 aa, Homo sapiens
CAKPLRSPFYFDDW

SEQ ID NO: 65795 - protein, 17 aa, Homo sapiens
CARGEYVWGSYRYIDSW

SEQ ID NO: 65796 - protein, 13 aa, Homo sapiens
CQQYHYWPPEVPF

SEQ ID NO: 65797 - protein, 16 aa, Homo sapiens
CVKDRRSSGDGTFDMW

SEQ ID NO: 65798 - protein, 26 aa, Homo sapiens
CARDQSIGTDDYSNFPFYYYYYMDVW

SEQ ID NO: 65799 - protein, 18 aa, Homo sapiens
CARRFSMFRGVIGSFDYW

SEQ ID NO: 65800 - protein, 25 aa, Homo sapiens
CARGIVVVVAATTLPPDYYYGMDVW

SEQ ID NO: 65801 - protein, 20 aa, Homo sapiens
CARDWAAAAGSPYYYGMDVW

SEQ ID NO: 65802 - protein, 20 aa, Homo sapiens
CVHRSYFPSSGFNAPYFDYW

SEQ ID NO: 65803 - protein, 16 aa, Homo sapiens
CARRRLRYFDWSFDYW

SEQ ID NO: 65804 - protein, 20 aa, Homo sapiens
CARDMYIYHSSSWTGWFDPW

SEQ ID NO: 65805 - protein, 14 aa, Homo sapiens
CGPAGVVAAIIDYW

SEQ ID NO: 65806 - protein, 16 aa, Homo sapiens
CARKEVWTQNDAFDIW

SEQ ID NO: 65807 - protein, 21 aa, Homo sapiens
CARGAKYYDSSDYRHYYFDYW

SEQ ID NO: 65808 - protein, 18 aa, Homo sapiens
CARTTYYYDSSGPCFDYW

SEQ ID NO: 65809 - protein, 18 aa, Homo sapiens
CARLGYCSSTSCPAFDYW

SEQ ID NO: 65810 - protein, 18 aa, Homo sapiens
CARGRGGRVLIHDALDIW

SEQ ID NO: 65811 - protein, 19 aa, Homo sapiens
CVRDVRERSYVQDWYFDLW

SEQ ID NO: 65812 - protein, 22 aa, Homo sapiens
CARVRELTIFGVVIMASWFDPW

SEQ ID NO: 65813 - protein, 22 aa, Homo sapiens
CATSEVALGYRSVWYFPYLDYW

SEQ ID NO: 65814 - protein, 24 aa, Homo sapiens
CARGFPYRILVLMVPYYYYYMDVW

SEQ ID NO: 65815 - protein, 16 aa, Homo sapiens
CTAGPSSGYDLSMDYW

SEQ ID NO: 65816 - protein, 22 aa, Homo sapiens
CARHGFVTIFGVVIIPGWFDPW

SEQ ID NO: 65817 - protein, 20 aa, Homo sapiens
CARCGEDSGSGSYLATFDFW

SEQ ID NO: 65818 - protein, 15 aa, Homo sapiens
CARDSITMLDAFDIW

SEQ ID NO: 65819 - protein, 20 aa, Homo sapiens
CARTRVRGVIIPVPYYFDYW

SEQ ID NO: 65820 - protein, 16 aa, Homo sapiens
CARSHTGGYSNPFDYW

SEQ ID NO: 65821 - protein, 16 aa, Homo sapiens
CARRGVDGYNLGFDYW

SEQ ID NO: 65822 - protein, 15 aa, Homo sapiens
CASRGGSSSWYPRYW

SEQ ID NO: 65823 - protein, 20 aa, Homo sapiens
CARDAVDSPFGGRLCYFDYW

SEQ ID NO: 65824 - protein, 11 aa, Homo sapiens
CANNSPSFDYW

SEQ ID NO: 65825 - protein, 17 aa, Homo sapiens
CARRKPDPWPTWYFDLW

SEQ ID NO: 65826 - protein, 22 aa, Homo sapiens
CAKPTYYYDSSGYLGDWYFDLW

SEQ ID NO: 65827 - protein, 24 aa, Homo sapiens
CARVEKRTIFGVLVGVDVYHLDYW

SEQ ID NO: 65828 - protein, 14 aa, Homo sapiens
CAKEVATGDGCDVW

SEQ ID NO: 65829 - protein, 21 aa, Homo sapiens
CARDFVEITIFGVVNNAFDIW

SEQ ID NO: 65830 - protein, 22 aa, Homo sapiens
CAKRKGIEWELLWGFSNYFDYW

SEQ ID NO: 65831 - protein, 20 aa, Homo sapiens
CVKGAGVIVVLTNLDAFDVW

SEQ ID NO: 65832 - protein, 22 aa, Homo sapiens
CARVRDYYDSSGYHSAYWFDPW

SEQ ID NO: 65833 - protein, 21 aa, Homo sapiens
CAKDSVITTFGYYYYYGMDVW

SEQ ID NO: 65834 - protein, 22 aa, Homo sapiens
CARAAGITETTRPGYYYGMDVW

SEQ ID NO: 65835 - protein, 25 aa, Homo sapiens
CARGMWGTGAAAGVIGHWYYYMDVW

SEQ ID NO: 65836 - protein, 14 aa, Homo sapiens
CQSAGSTGPYPVLF

SEQ ID NO: 65837 - protein, 22 aa, Homo sapiens
CARHGFYGSGSYYGYYYGMDVW

SEQ ID NO: 65838 - protein, 16 aa, Homo sapiens
CARGEAWGFSGAFDIW

SEQ ID NO: 65839 - protein, 23 aa, Homo sapiens
CASVYCTNGVCHDRYYYYGMDVW

SEQ ID NO: 65840 - protein, 24 aa, Homo sapiens
CATDSALDGANLNFWSGYYPFDYW

SEQ ID NO: 65841 - protein, 23 aa, Homo sapiens
CARGTEVTFGGVIVIEMLSFDYW

SEQ ID NO: 65842 - protein, 18 aa, Homo sapiens
CARLPSSVIVGATYFDYW

SEQ ID NO: 65843 - protein, 17 aa, Homo sapiens
CARIDYSSGYYYMIDYW

SEQ ID NO: 65844 - protein, 20 aa, Homo sapiens
CARDGGDYDGFYFSYAMDVW

SEQ ID NO: 65845 - protein, 22 aa, Homo sapiens
CATDRGYSYGPGHRTRWWFDPW

SEQ ID NO: 65846 - protein, 18 aa, Homo sapiens
CARAALAPRPTGYYFDYW

SEQ ID NO: 65847 - protein, 17 aa, Homo sapiens
CARDFKNELLDNAFDVW

SEQ ID NO: 65848 - protein, 19 aa, Homo sapiens
CARDRSADGGGTDGMFDYW

SEQ ID NO: 65849 - protein, 20 aa, Homo sapiens
CARENYADGGNSWFGWFDPW

SEQ ID NO: 65850 - protein, 20 aa, Homo sapiens
CAKDRDYGGASISGRYFHLW

SEQ ID NO: 65851 - protein, 13 aa, Homo sapiens
CARMGLYTALDYW

SEQ ID NO: 65852 - protein, 17 aa, Homo sapiens
CARDYSGHNFGWYFDLW

SEQ ID NO: 65853 - protein, 21 aa, Homo sapiens
CARHKISGSGWYKMAPYFDYW

SEQ ID NO: 65854 - protein, 17 aa, Homo sapiens
CARETGEGDYHDAFDIW

SEQ ID NO: 65855 - protein, 19 aa, Homo sapiens
CALPICSGSYYTNNWFDPW

SEQ ID NO: 65856 - protein, 16 aa, Homo sapiens
CARPHPSDFGVVFDYW

SEQ ID NO: 65857 - protein, 20 aa, Homo sapiens
CARANLQLWPHDYYYGMDVW

SEQ ID NO: 65858 - protein, 23 aa, Homo sapiens
CARGVRRYDFWSGYPYYYYMDVW

SEQ ID NO: 65859 - protein, 26 aa, Homo sapiens
CARDSRRITIFGVVITLDYYYGMDVW

SEQ ID NO: 65860 - protein, 19 aa, Homo sapiens
CAREQAAAGTFSAGAFDIW

SEQ ID NO: 65861 - protein, 24 aa, Homo sapiens
CAKDGSLGYYDSSGYYEGDYFDYW

SEQ ID NO: 65862 - protein, 20 aa, Homo sapiens
CLGEGDFWSGYYYYYYMDVW

SEQ ID NO: 65863 - protein, 23 aa, Homo sapiens
CAVWRSYYGSGSYSYYYYGMDVW

SEQ ID NO: 65864 - protein, 15 aa, Homo sapiens
CATDSSSYYLMFDYW

SEQ ID NO: 65865 - protein, 16 aa, Homo sapiens
CARAGLAAINPWFDPW

SEQ ID NO: 65866 - protein, 25 aa, Homo sapiens
CASLRAFTIFGVVIIGGDYYYMDVW

SEQ ID NO: 65867 - protein, 17 aa, Homo sapiens
CARHIATTPAFNGFDYW

SEQ ID NO: 65868 - protein, 20 aa, Homo sapiens
CARVGIDYFDSRGYWYFDLW

SEQ ID NO: 65869 - protein, 19 aa, Homo sapiens
CARHFYSSGWYAYYGMDVW

SEQ ID NO: 65870 - protein, 14 aa, Homo sapiens
CASSVVIRRYFDHW

SEQ ID NO: 65871 - protein, 22 aa, Homo sapiens
CARTAWKSSGWKTYYYYGMDVW

SEQ ID NO: 65872 - protein, 15 aa, Homo sapiens
CARDPYPIIPKFDYW

SEQ ID NO: 65873 - protein, 17 aa, Homo sapiens
CAKDQIVVVITGYFDYW

SEQ ID NO: 65874 - protein, 25 aa, Homo sapiens
CATDPVGHFAPGTYHKRPARAFDMW

SEQ ID NO: 65875 - protein, 16 aa, Homo sapiens
CAKGGPLHKTPLFDYW

SEQ ID NO: 65876 - protein, 19 aa, Homo sapiens
CARHRLGWGENHQDGMDVW

SEQ ID NO: 65877 - protein, 18 aa, Homo sapiens
CTRGSSEDFYDYYGMDVW

SEQ ID NO: 65878 - protein, 21 aa, Homo sapiens
CARTPYYYDSSGYYYSAFDIW

SEQ ID NO: 65879 - protein, 21 aa, Homo sapiens
CAKNGIKDIVVPGPYWYFDLW

SEQ ID NO: 65880 - protein, 20 aa, Homo sapiens
CARGGVRIQLWLREGFIDYW

SEQ ID NO: 65881 - protein, 18 aa, Homo sapiens
CARRGYDSSSYFYLFDYW

SEQ ID NO: 65882 - protein, 16 aa, Homo sapiens
CARLSSRGGRYYFDSW

SEQ ID NO: 65883 - protein, 16 aa, Homo sapiens
CARTYGGKPYNWFDPW

SEQ ID NO: 65884 - protein, 23 aa, Homo sapiens
CARGGWARQDTIFGVALNWFDPW

SEQ ID NO: 65885 - protein, 20 aa, Homo sapiens
CAREGYCSSTNCYGGGLDYW

SEQ ID NO: 65886 - protein, 17 aa, Homo sapiens
CAVLTNYPPSIQAFDIW

SEQ ID NO: 65887 - protein, 24 aa, Homo sapiens
CAKDRGACSGGSCYPFETYYFDYW

SEQ ID NO: 65888 - protein, 13 aa, Homo sapiens
CTRVWKQLVSDYW

SEQ ID NO: 65889 - protein, 12 aa, Homo sapiens
CVRHGQYAYDVW

SEQ ID NO: 65890 - protein, 26 aa, Homo sapiens
CARLSPEVDFYESSAYHFGSDYFDYW

SEQ ID NO: 65891 - protein, 19 aa, Homo sapiens
CAHRLPPLINGPTDAFDIW

SEQ ID NO: 65892 - protein, 16 aa, Homo sapiens
CATDARIQLWLQYDYW

SEQ ID NO: 65893 - protein, 19 aa, Homo sapiens
CARPESPMYYYGSGSFSYW

SEQ ID NO: 65894 - protein, 17 aa, Homo sapiens
CARPRREYSPWDPSDIW

SEQ ID NO: 65895 - protein, 17 aa, Homo sapiens
CARQPQGPFSGDAFDIW

SEQ ID NO: 65896 - protein, 19 aa, Homo sapiens
CARIPIAARLDYYYYMDVW

SEQ ID NO: 65897 - protein, 16 aa, Homo sapiens
CARDPGGFEPGAFDPW

SEQ ID NO: 65898 - protein, 19 aa, Homo sapiens
CARARGPEYSTSSYFSDYW

SEQ ID NO: 65899 - protein, 19 aa, Homo sapiens
CARAPHFEFYDHRVSFDNW

SEQ ID NO: 65900 - protein, 21 aa, Homo sapiens
CARDGHSGGLYYYYYTALDVW

SEQ ID NO: 65901 - protein, 26 aa, Homo sapiens
CARDIFGVAGIRGGDSFYYYYGMDVW

SEQ ID NO: 65902 - protein, 21 aa, Homo sapiens
CARIQDYDFYSGSPLNAFDIW

SEQ ID NO: 65903 - protein, 15 aa, Homo sapiens
CARRIAGEANVFDLW

SEQ ID NO: 65904 - protein, 31 aa, Homo sapiens
CALPISAADTGMYYCARDHPDNDYGDYAGYW

SEQ ID NO: 65905 - protein, 26 aa, Homo sapiens
CARDIRDGTYNYDSSGYSSAPAFDYW

SEQ ID NO: 65906 - protein, 23 aa, Homo sapiens
CARDLAPSTVTTIIYYYYGMDVW

SEQ ID NO: 65907 - protein, 21 aa, Homo sapiens
CARTGYSSSWPKKTYNWFDPW

SEQ ID NO: 65908 - protein, 34 aa, Homo sapiens
CARADCSEGVCYSGDVGKKTQSVPFYSFYYMDVW

SEQ ID NO: 65909 - protein, 16 aa, Homo sapiens
CARDKDGLAVAPFDYW

SEQ ID NO: 65910 - protein, 17 aa, Homo sapiens
CAKDLWYDILTGYFDYW

SEQ ID NO: 65911 - protein, 18 aa, Homo sapiens
CARGVDDILPGLHYFDYW

SEQ ID NO: 65912 - protein, 21 aa, Homo sapiens
CARKKLYCSSTSCYNWYFDLW

SEQ ID NO: 65913 - protein, 21 aa, Homo sapiens
CARGTKLLVYARGPRISFDYW

SEQ ID NO: 65914 - protein, 19 aa, Homo sapiens
CATDRSEVWSGYYTPFDYW

SEQ ID NO: 65915 - protein, 19 aa, Homo sapiens
CARTGCNGVSCYVGAFDIW

SEQ ID NO: 65916 - protein, 17 aa, Homo sapiens
CARQDFRTVRATYLDFW

SEQ ID NO: 65917 - protein, 17 aa, Homo sapiens
CAKDRQEVAQQYFFDHW

SEQ ID NO: 65918 - protein, 14 aa, Homo sapiens
CAHSRIGGWAFDYW

SEQ ID NO: 65919 - protein, 21 aa, Homo sapiens
CARSSITMIVVVIIYNAFDIW

SEQ ID NO: 65920 - protein, 13 aa, Homo sapiens
CQVRDSSADHPLF

SEQ ID NO: 65921 - protein, 21 aa, Homo sapiens
CAKNSYEYGSGRFYRRQFDHW

SEQ ID NO: 65922 - protein, 14 aa, Homo sapiens
CAIKYSDYQAFDIW

SEQ ID NO: 65923 - protein, 23 aa, Homo sapiens
CARSKPRDGGIILLVYSTVFDYW

SEQ ID NO: 65924 - protein, 18 aa, Homo sapiens
CARHGDPYYYYAYYMDVW

SEQ ID NO: 65925 - protein, 20 aa, Homo sapiens
CARKRVTYYYDSSGSVFDYW

SEQ ID NO: 65926 - protein, 23 aa, Homo sapiens
CARYDFWSGYHQSGAQSGSFDYW

SEQ ID NO: 65927 - protein, 16 aa, Homo sapiens
CARGDLTRGQKTFDYW

SEQ ID NO: 65928 - protein, 15 aa, Homo sapiens
CARPYSSSRGDFGYW

SEQ ID NO: 65929 - protein, 23 aa, Homo sapiens
CARRGAGMYNWNDGYYYYGMDVW

SEQ ID NO: 65930 - protein, 17 aa, Homo sapiens
CARGWDMTTNKDAFDIW

SEQ ID NO: 65931 - protein, 23 aa, Homo sapiens
CAKDSVVEIEVVVAGSSRYFDSW

SEQ ID NO: 65932 - protein, 20 aa, Homo sapiens
CARVVPNTIRFYYYYYMDVW

SEQ ID NO: 65933 - protein, 18 aa, Homo sapiens
CARHVTVRYDSSGYYDYW

SEQ ID NO: 65934 - protein, 21 aa, Homo sapiens
CTTVGHYYYDSSGYSELFDYW

SEQ ID NO: 65935 - protein, 13 aa, Homo sapiens
CHTAMVLDAFDIW

SEQ ID NO: 65936 - protein, 22 aa, Homo sapiens
CARDLTAGNWNDVYYYYGMDVW

SEQ ID NO: 65937 - protein, 23 aa, Homo sapiens
CARDPPITIFGVVIGPEYYMDVW

SEQ ID NO: 65938 - protein, 14 aa, Homo sapiens
CAKVSTTGDHGDYW

SEQ ID NO: 65939 - protein, 15 aa, Homo sapiens
CSRHDYGGGHWVDSW

SEQ ID NO: 65940 - protein, 23 aa, Homo sapiens
CARAPRVLPIFGVVQIRGAFDIW

SEQ ID NO: 65941 - protein, 25 aa, Homo sapiens
CAKFPRNYDFWSGYYLRGAEYFQHW

SEQ ID NO: 65942 - protein, 22 aa, Homo sapiens
CASDGNYCSGGACYREGYFDYW

SEQ ID NO: 65943 - protein, 17 aa, Homo sapiens
CAREKGIDLRRVPYDYW

SEQ ID NO: 65944 - protein, 16 aa, Homo sapiens
CARGSTLVGTRLFDWW

SEQ ID NO: 65945 - protein, 17 aa, Homo sapiens
CARDVGYSSGPRYFQHW

SEQ ID NO: 65946 - protein, 14 aa, Homo sapiens
CARGNWGGGSCDYW

SEQ ID NO: 65947 - protein, 14 aa, Homo sapiens
CAKLSGDYEEADYW

SEQ ID NO: 65948 - protein, 19 aa, Homo sapiens
CARGRRDYGDFEPWYFDLW

SEQ ID NO: 65949 - protein, 23 aa, Homo sapiens
CARFVVVPVLLGGAYYYYGMDVW

SEQ ID NO: 65950 - protein, 21 aa, Homo sapiens
CASSRGYCSGGSCYSFWFDPW

SEQ ID NO: 65951 - protein, 19 aa, Homo sapiens
CARQMYSSSWYDANWFDPW

SEQ ID NO: 65952 - protein, 12 aa, Homo sapiens
CAIITGINVDYW

SEQ ID NO: 65953 - protein, 16 aa, Homo sapiens
CTRGGDALLWFGADYW

SEQ ID NO: 65954 - protein, 27 aa, Homo sapiens
CARTGLVRERYCSGGSCSLYYYGMDVW

SEQ ID NO: 65955 - protein, 16 aa, Homo sapiens
CAKGYNGGLYGDFDNW

SEQ ID NO: 65956 - protein, 16 aa, Homo sapiens
CARHSGYYSSTFLDYW

SEQ ID NO: 65957 - protein, 32 aa, Homo sapiens
CARDRPISKPNTDPGFITIFGVVPYYYYMDVW

SEQ ID NO: 65958 - protein, 25 aa, Homo sapiens
CASTLKPRFLEWLLYRSRYYYMDVW

SEQ ID NO: 65959 - protein, 21 aa, Homo sapiens
CARAGYSSGWSTRLYYYMDVW

SEQ ID NO: 65960 - protein, 14 aa, Homo sapiens
CVKMLSGSYGNDYW

SEQ ID NO: 65961 - protein, 16 aa, Homo sapiens
CARDLQQQPYGWFDPW

SEQ ID NO: 65962 - protein, 21 aa, Homo sapiens
CASGRGYCSSSTCLANYFDYW

SEQ ID NO: 65963 - protein, 15 aa, Homo sapiens
CARGDDYWWGQFDPW

SEQ ID NO: 65964 - protein, 17 aa, Homo sapiens
CAIADGEYGSPRTFDPW

SEQ ID NO: 65965 - protein, 17 aa, Homo sapiens
CARDWIFGVATGWFDPW

SEQ ID NO: 65966 - protein, 23 aa, Homo sapiens
CARHATGYCTSGRHCYSYAFDIW

SEQ ID NO: 65967 - protein, 17 aa, Homo sapiens
CARDLIPTIFAGWFDPW

SEQ ID NO: 65968 - protein, 22 aa, Homo sapiens
CARGSRGRARRTVTTYWYLDLW

SEQ ID NO: 65969 - protein, 16 aa, Homo sapiens
CARDFFTSPTYYFDYW

SEQ ID NO: 65970 - protein, 24 aa, Homo sapiens
CARDPSLLSVMVYVVDRADAFDIW

SEQ ID NO: 65971 - protein, 17 aa, Homo sapiens
CARMRGGSYSGWYFDLW

SEQ ID NO: 65972 - protein, 17 aa, Homo sapiens
CARRYYDHIWGCYVDYW

SEQ ID NO: 65973 - protein, 15 aa, Homo sapiens
CVKDISRGMNRLDYW

SEQ ID NO: 65974 - protein, 17 aa, Homo sapiens
CARYPGGGSPFYYFDQW

SEQ ID NO: 65975 - protein, 18 aa, Homo sapiens
CARMFGSGSYREPWFDPW

SEQ ID NO: 65976 - protein, 22 aa, Homo sapiens
CARTRSGLYYDFWSGSNWFDPW

SEQ ID NO: 65977 - protein, 19 aa, Homo sapiens
CAREGSGDTDILNWWFDPW

SEQ ID NO: 65978 - protein, 22 aa, Homo sapiens
CAKDRVSSGRDNKSYYYYMDVW

SEQ ID NO: 65979 - protein, 15 aa, Homo sapiens
CALLYCGSVDCFDYW

SEQ ID NO: 65980 - protein, 22 aa, Homo sapiens
CAKKVGSYCSSTSCYVGYFDYW

SEQ ID NO: 65981 - protein, 15 aa, Homo sapiens
CARDQVTAMAGFDYW

SEQ ID NO: 65982 - protein, 20 aa, Homo sapiens
CARDPPTTVTQLYYYGMDVW

SEQ ID NO: 65983 - protein, 22 aa, Homo sapiens
CAREGPVRYSYAVYYYYGMDVW

SEQ ID NO: 65984 - protein, 16 aa, Homo sapiens
CARSGSYIGIRYFDYW

SEQ ID NO: 65985 - protein, 19 aa, Homo sapiens
CAKNYYDSSGYYVGAFDIW

SEQ ID NO: 65986 - protein, 15 aa, Homo sapiens
CARRRANSNQAFSIW

SEQ ID NO: 65987 - protein, 11 aa, Homo sapiens
CAIIVDDFDYW

SEQ ID NO: 65988 - protein, 15 aa, Homo sapiens
CVRRTVTGNSFVDYW

SEQ ID NO: 65989 - protein, 19 aa, Homo sapiens
CARSYCGSTNCSHDAFDIW

SEQ ID NO: 65990 - protein, 20 aa, Homo sapiens
CAVNARAYTSSPKDKSFDYW

SEQ ID NO: 65991 - protein, 19 aa, Homo sapiens
CAQDRRLFHLGVDYYFDYW

SEQ ID NO: 65992 - protein, 22 aa, Homo sapiens
CARVYCGGDCYNLLIDDAFDIW

SEQ ID NO: 65993 - protein, 16 aa, Homo sapiens
CARVNDYGVNNWFDPW

SEQ ID NO: 65994 - protein, 19 aa, Homo sapiens
CASLWFGELFPGLAFFDYW

SEQ ID NO: 65995 - protein, 17 aa, Homo sapiens
CAKDRDIWFGEFYMDVW

SEQ ID NO: 65996 - protein, 23 aa, Homo sapiens
CARDLRRTLFGVVINSPNYFDYW

SEQ ID NO: 65997 - protein, 22 aa, Homo sapiens
CARDRNPFYSGNYYFPEDFDYW

SEQ ID NO: 65998 - protein, 16 aa, Homo sapiens
CARIVFGAKFVYFDYW

SEQ ID NO: 65999 - protein, 16 aa, Homo sapiens
CARYPLPPFLDYFDYW

SEQ ID NO: 66000 - protein, 18 aa, Homo sapiens
CARDAEFYGSGTSPLDYW

SEQ ID NO: 66001 - protein, 17 aa, Homo sapiens
CARVGIMYSPNGWLDPW

SEQ ID NO: 66002 - protein, 16 aa, Homo sapiens
CVRDGGVGGHTAFDIW

SEQ ID NO: 66003 - protein, 21 aa, Homo sapiens
CTTSFLTGYYIDYYYYGMDVW

SEQ ID NO: 66004 - protein, 19 aa, Homo sapiens
CAKEAYRGSYSYYYGMDVW

SEQ ID NO: 66005 - protein, 22 aa, Homo sapiens
CAREPSDRYYGSGSYSEYFQHW

SEQ ID NO: 66006 - protein, 25 aa, Homo sapiens
CALPICRVDYGVLSGYYQGGILDYW

SEQ ID NO: 66007 - protein, 16 aa, Homo sapiens
CATRLNTNSWAHFDYW

SEQ ID NO: 66008 - protein, 15 aa, Homo sapiens
CARDRSGTTGGFDYW

SEQ ID NO: 66009 - protein, 16 aa, Homo sapiens
CARRYCYRGSCRFDYW

SEQ ID NO: 66010 - protein, 13 aa, Homo sapiens
CARKSATVVPDYW

SEQ ID NO: 66011 - protein, 18 aa, Homo sapiens
CARAGHSGWYLGYYFDSW

SEQ ID NO: 66012 - protein, 14 aa, Homo sapiens
CARGSGSGWYGGYW

SEQ ID NO: 66013 - protein, 27 aa, Homo sapiens
CARITDPYPEFTIFGVVETYRDAFDIW

SEQ ID NO: 66014 - protein, 20 aa, Homo sapiens
CATQAYCNGDCSSLWYFDLW

SEQ ID NO: 66015 - protein, 13 aa, Homo sapiens
CARVATWGGFDIW

SEQ ID NO: 66016 - protein, 20 aa, Homo sapiens
CARERDFGEIPYYYHAMDVW

SEQ ID NO: 66017 - protein, 17 aa, Homo sapiens
CTKSFRRLVRLGHFDPW

SEQ ID NO: 66018 - protein, 13 aa, Homo sapiens
CARLPQNRYFDFW

SEQ ID NO: 66019 - protein, 20 aa, Homo sapiens
CARHKPYYDFWSTYLAFDIW

SEQ ID NO: 66020 - protein, 18 aa, Homo sapiens
CARGVDYDRAVAGTFDIW

SEQ ID NO: 66021 - protein, 17 aa, Homo sapiens
CARRSHDYGDPFPFDYW

SEQ ID NO: 66022 - protein, 17 aa, Homo sapiens
CARDLLTTGYYYGMDVW

SEQ ID NO: 66023 - protein, 19 aa, Homo sapiens
CARHYSSSSGVLDLLFDYW

SEQ ID NO: 66024 - protein, 18 aa, Homo sapiens
CTRGFFSAFAPDARRDYW

SEQ ID NO: 66025 - protein, 16 aa, Homo sapiens
CARARLPGQLRTFDYW

SEQ ID NO: 66026 - protein, 18 aa, Homo sapiens
CARGDPHNFWSGYYLDYW

SEQ ID NO: 66027 - protein, 22 aa, Homo sapiens
CVRDRRGSYYGSENLSMYMDVW

SEQ ID NO: 66028 - protein, 21 aa, Homo sapiens
CARDYSFDSRGYYYGGGFEYW

SEQ ID NO: 66029 - protein, 19 aa, Homo sapiens
CAKDYQLLPRVYYYGMDVW

SEQ ID NO: 66030 - protein, 14 aa, Homo sapiens
CQQFNPYPPHMYTF

SEQ ID NO: 66031 - protein, 14 aa, Homo sapiens
CARHYTWNFNFHYW

SEQ ID NO: 66032 - protein, 23 aa, Homo sapiens
CARESTSVDYYDSGSYYYYFDYW

SEQ ID NO: 66033 - protein, 18 aa, Homo sapiens
CTCTMVPGVKRETPTDYW

SEQ ID NO: 66034 - protein, 23 aa, Homo sapiens
CARASWGRDFWSGAHYYYYMDVW

SEQ ID NO: 66035 - protein, 13 aa, Homo sapiens
CQHYDILPPRHTF

SEQ ID NO: 66036 - protein, 17 aa, Homo sapiens
CAKDIQGRFLPDAFDIW

SEQ ID NO: 66037 - protein, 24 aa, Homo sapiens
CAHRGSPYYDRRGYFVPLEYFDHW

SEQ ID NO: 66038 - protein, 18 aa, Homo sapiens
CAKDMEDGYSYGIMFDYW

SEQ ID NO: 66039 - protein, 16 aa, Homo sapiens
CARNMGGSRRGYFDSW

SEQ ID NO: 66040 - protein, 17 aa, Homo sapiens
CTKDRGDGYNLGGFDYW

SEQ ID NO: 66041 - protein, 18 aa, Homo sapiens
CATFWYSSSWYYYGMDVW

SEQ ID NO: 66042 - protein, 22 aa, Homo sapiens
CARLQVDSSQMLVRSFYYMDVW

SEQ ID NO: 66043 - protein, 18 aa, Homo sapiens
CAKDKSSGYRPANYFDYW

SEQ ID NO: 66044 - protein, 20 aa, Homo sapiens
CATLTRAYCGGDCWGAFDIW

SEQ ID NO: 66045 - protein, 22 aa, Homo sapiens
CAAHARIRFSNVDIVATTVDYW

SEQ ID NO: 66046 - protein, 26 aa, Homo sapiens
CAKASGGDYSSSWEPLYYYYYYMDVW

SEQ ID NO: 66047 - protein, 21 aa, Homo sapiens
CARDRRVWVLFEDYYYGMDVW

SEQ ID NO: 66048 - protein, 16 aa, Homo sapiens
CARDDSYYDNGGFPYW

SEQ ID NO: 66049 - protein, 17 aa, Homo sapiens
CAYCSSSNCPQSAFDVW

SEQ ID NO: 66050 - protein, 25 aa, Homo sapiens
CATEGYCSSTSCSPWYYYYYYMDVW

SEQ ID NO: 66051 - protein, 25 aa, Homo sapiens
CARDAGLWQQLVRPPYYYSYYMDVW

SEQ ID NO: 66052 - protein, 21 aa, Homo sapiens
CARGAYGLLWFGEYRGWFDPW

SEQ ID NO: 66053 - protein, 17 aa, Homo sapiens
CARDRAAYGAEYHFDYW

SEQ ID NO: 66054 - protein, 17 aa, Homo sapiens
CASSSRAAILTDAFDVW

SEQ ID NO: 66055 - protein, 20 aa, Homo sapiens
CARAFRVYYYDSSGYFFDYW

SEQ ID NO: 66056 - protein, 19 aa, Homo sapiens
CARISPEAGHYGAAELDYW

SEQ ID NO: 66057 - protein, 19 aa, Homo sapiens
CARGREPMIVVVVTSFDSW

SEQ ID NO: 66058 - protein, 16 aa, Homo sapiens
CARDGWAVSRYHFDYW

SEQ ID NO: 66059 - protein, 19 aa, Homo sapiens
CARDRVVATKVVAGLFDIW

SEQ ID NO: 66060 - protein, 23 aa, Homo sapiens
CAILSRGYYYDSSGYPTGPIDYW

SEQ ID NO: 66061 - protein, 22 aa, Homo sapiens
CARAIYYDFWSGYYDTDYFDYW

SEQ ID NO: 66062 - protein, 15 aa, Homo sapiens
CARDLPFDSSGSDYW

SEQ ID NO: 66063 - protein, 18 aa, Homo sapiens
CASSYPGGDSWSGYYRYW

SEQ ID NO: 66064 - protein, 20 aa, Homo sapiens
CARHPLFGVVAWDRYYFDYW

SEQ ID NO: 66065 - protein, 21 aa, Homo sapiens
CARDFPDTAMGSRYYYGMDVW

SEQ ID NO: 66066 - protein, 18 aa, Homo sapiens
CTSGGYSSGWYWSILDYW

SEQ ID NO: 66067 - protein, 20 aa, Homo sapiens
CAILSDDGDYVGGSGWFDPW

SEQ ID NO: 66068 - protein, 19 aa, Homo sapiens
CAKDAYVRRNTVFGPFDSW

SEQ ID NO: 66069 - protein, 14 aa, Homo sapiens
CATLRSFYWYSDLW

SEQ ID NO: 66070 - protein, 19 aa, Homo sapiens
CARRYYYDDSDNYYYFDYW

SEQ ID NO: 66071 - protein, 19 aa, Homo sapiens
CTREVLTSGGWYLNFFDSW

SEQ ID NO: 66072 - protein, 26 aa, Homo sapiens
CATLTVSSHSKNRNVEGYYYYYMDVW

SEQ ID NO: 66073 - protein, 14 aa, Homo sapiens
CARGIAAGPLFDPW

SEQ ID NO: 66074 - protein, 23 aa, Homo sapiens
CAKEPLATGCISGVCLNYYMDVW

SEQ ID NO: 66075 - protein, 18 aa, Homo sapiens
CARDCRSNSCFYDAFDIW

SEQ ID NO: 66076 - protein, 14 aa, Homo sapiens
CARDLHWEARFDPW

SEQ ID NO: 66077 - protein, 21 aa, Homo sapiens
CAKEVNVVGNYYYYYYAMDVW

SEQ ID NO: 66078 - protein, 23 aa, Homo sapiens
CAKDRVLFFGVTTYYSYSGMDVW

SEQ ID NO: 66079 - protein, 18 aa, Homo sapiens
CARGKTYYHSSEENFDYW

SEQ ID NO: 66080 - protein, 13 aa, Homo sapiens
CARLLDEYTLDYW

SEQ ID NO: 66081 - protein, 21 aa, Homo sapiens
CAHEESIVVVPAAYPGWFDPW

SEQ ID NO: 66082 - protein, 16 aa, Homo sapiens
CARRNIAASADPFDYW

SEQ ID NO: 66083 - protein, 20 aa, Homo sapiens
CAKDRDSGVGSYSWGYFENW

SEQ ID NO: 66084 - protein, 21 aa, Homo sapiens
CARDPFPDVMITKKHNWFDPW

SEQ ID NO: 66085 - protein, 20 aa, Homo sapiens
CAKGSYYDFWSGYYTGIDYW

SEQ ID NO: 66086 - protein, 25 aa, Homo sapiens
CARAGGDSHSGGRYGLHYYYGMDVW

SEQ ID NO: 66087 - protein, 16 aa, Homo sapiens
CARGVEGRYGFDFDSW

SEQ ID NO: 66088 - protein, 17 aa, Homo sapiens
CARDSKDGHGSGWFPYW

SEQ ID NO: 66089 - protein, 18 aa, Homo sapiens
CARVALVRGVLGDYFDYW

SEQ ID NO: 66090 - protein, 15 aa, Homo sapiens
CARGNIDQANAFDIW

SEQ ID NO: 66091 - protein, 19 aa, Homo sapiens
CARHNTPLLWFGESPFDYW

SEQ ID NO: 66092 - protein, 21 aa, Homo sapiens
CARDLSGSGVIGYYYYGMDVW

SEQ ID NO: 66093 - protein, 19 aa, Homo sapiens
CARWGGSGNYWYYYGMDVW

SEQ ID NO: 66094 - protein, 19 aa, Homo sapiens
CARDRNGDYSYYYYAMDVW

SEQ ID NO: 66095 - protein, 23 aa, Homo sapiens
CARGWWARIAAATDYYYYGMDVW

SEQ ID NO: 66096 - protein, 30 aa, Homo sapiens
CAKDSTYYDFWSGYFPQANHYYYYYYMDVW

SEQ ID NO: 66097 - protein, 21 aa, Homo sapiens
CAAGPIIAATPYYSYYYMDVW

SEQ ID NO: 66098 - protein, 21 aa, Homo sapiens
CARAYLYSSGWLTGANAFDIW

SEQ ID NO: 66099 - protein, 16 aa, Homo sapiens
CARGFVTGEGVTVDYW

SEQ ID NO: 66100 - protein, 17 aa, Homo sapiens
CARGRGGPISFVDFDMW

SEQ ID NO: 66101 - protein, 16 aa, Homo sapiens
CARVVEDWDRYWFDPW

SEQ ID NO: 66102 - protein, 19 aa, Homo sapiens
CARAKSGNDYNSHWYFDLW

SEQ ID NO: 66103 - protein, 18 aa, Homo sapiens
CAKRGSRAGSLTGTFDYW

SEQ ID NO: 66104 - protein, 15 aa, Homo sapiens
CATDKAITGTYFDYW

SEQ ID NO: 66105 - protein, 15 aa, Homo sapiens
CARGGYLLDDAFDIW

SEQ ID NO: 66106 - protein, 25 aa, Homo sapiens
CAKGVRYEGSGYYYLDYYYYYMDVW

SEQ ID NO: 66107 - protein, 19 aa, Homo sapiens
CARRNYDFWSGFGDGMDVW

SEQ ID NO: 66108 - protein, 16 aa, Homo sapiens
CAQVGVGVQFGWLDPW

SEQ ID NO: 66109 - protein, 22 aa, Homo sapiens
CARGSRIAAHNIYYYYYGMDVW

SEQ ID NO: 66110 - protein, 18 aa, Homo sapiens
CARVGTVVAGKGFLFDPW

SEQ ID NO: 66111 - protein, 21 aa, Homo sapiens
CARGGASFGVVISWNNWFDPW

SEQ ID NO: 66112 - protein, 19 aa, Homo sapiens
CARMPSRYSNGWYDWFDPW

SEQ ID NO: 66113 - protein, 19 aa, Homo sapiens
CARSRGSISNPYYYGMDVW

SEQ ID NO: 66114 - protein, 16 aa, Homo sapiens
CVKDKGSHHNWYFDLW

SEQ ID NO: 66115 - protein, 14 aa, Homo sapiens
CQELNTYPPGPGTF

SEQ ID NO: 66116 - protein, 20 aa, Homo sapiens
CAKENCGRDTCWNAEYFQHW

SEQ ID NO: 66117 - protein, 16 aa, Homo sapiens
CATEDSYAYFHWFDSW

SEQ ID NO: 66118 - protein, 14 aa, Homo sapiens
CQHYDNVPPRMYTF

SEQ ID NO: 66119 - protein, 23 aa, Homo sapiens
CARLGDRYCSGGTCYSLRVFDYW

SEQ ID NO: 66120 - protein, 16 aa, Homo sapiens
CAKDPAPAINYYMDVW

SEQ ID NO: 66121 - protein, 24 aa, Homo sapiens
CARDGRYFHDTSGYHYSYYYFDLW

SEQ ID NO: 66122 - protein, 15 aa, Homo sapiens
CAKDIGPLAGGFDYW

SEQ ID NO: 66123 - protein, 19 aa, Homo sapiens
CAKDIDFWSGYPRKAFDSW

SEQ ID NO: 66124 - protein, 13 aa, Homo sapiens
CARVREGTLGDYW

SEQ ID NO: 66125 - protein, 19 aa, Homo sapiens
CARTPNTMIAVLTPDLDYW

SEQ ID NO: 66126 - protein, 16 aa, Homo sapiens
CAHLGLLLRGNAFDIW

SEQ ID NO: 66127 - protein, 26 aa, Homo sapiens
CARGYCSSTSCYAETLFFGGYWFDPW

SEQ ID NO: 66128 - protein, 21 aa, Homo sapiens
CSSTSCYALIVTNYYYGMDVW

SEQ ID NO: 66129 - protein, 22 aa, Homo sapiens
CARVIGAQFTIFGVVANAFDIW

SEQ ID NO: 66130 - protein, 18 aa, Homo sapiens
CARIVLGAVAGMVAFDIW

SEQ ID NO: 66131 - protein, 24 aa, Homo sapiens
CAKARHDFYYGSGSYDDSNWFDPW

SEQ ID NO: 66132 - protein, 15 aa, Homo sapiens
CARSNIAVAVCFDYW

SEQ ID NO: 66133 - protein, 20 aa, Homo sapiens
CGKDIEFLTWLSPPNFFDPW

SEQ ID NO: 66134 - protein, 21 aa, Homo sapiens
CARDYYELPPDDYYYYGMDVW

SEQ ID NO: 66135 - protein, 16 aa, Homo sapiens
CARDINSGYVRLFEYW

SEQ ID NO: 66136 - protein, 20 aa, Homo sapiens
CARLRGYSGYDYYYYGMDVW

SEQ ID NO: 66137 - protein, 20 aa, Homo sapiens
CASRAKGIGEPGIAAIIDYW

SEQ ID NO: 66138 - protein, 15 aa, Homo sapiens
CATETTGIRIYFDSW

SEQ ID NO: 66139 - protein, 20 aa, Homo sapiens
CARGLDSSGYYYLGDAFDIW

SEQ ID NO: 66140 - protein, 26 aa, Homo sapiens
CARESLVQRFLEWLSSGLPVYYFDYW

SEQ ID NO: 66141 - protein, 16 aa, Homo sapiens
CVRSLKTGTTWEFDYW

SEQ ID NO: 66142 - protein, 24 aa, Homo sapiens
CARVSSSMIVVVITIYYYYCMDVW

SEQ ID NO: 66143 - protein, 13 aa, Homo sapiens
CARVGLSDNVDYW

SEQ ID NO: 66144 - protein, 20 aa, Homo sapiens
CARGWKVATIMHYYYYMDVW

SEQ ID NO: 66145 - protein, 11 aa, Homo sapiens [sequence omitted]

SEQ ID NO: 66146 - protein, 25 aa, Homo sapiens
CARAPSGIQLFSPRTGAYYYYMDVW

SEQ ID NO: 66147 - protein, 20 aa, Homo sapiens
CARQALYETYCGVACGFDIW

SEQ ID NO: 66148 - protein, 16 aa, Homo sapiens
CARYEGLSSPRMFDYW

SEQ ID NO: 66149 - protein, 21 aa, Homo sapiens
CLRGYCSSSSCPPYLYYMDVW

SEQ ID NO: 66150 - protein, 18 aa, Homo sapiens
CASQRISIFGVLEWFDPW

SEQ ID NO: 66151 - protein, 22 aa, Homo sapiens
CARNLFGGRSGSYFSPWAFDIW

SEQ ID NO: 66152 - protein, 19 aa, Homo sapiens
CAKDRVVVASTFETDFDVW

SEQ ID NO: 66153 - protein, 21 aa, Homo sapiens
CARFRSNHVQITYYYYGMDVW

SEQ ID NO: 66154 - protein, 16 aa, Homo sapiens
CAHRRSSYGSYYFDYW

SEQ ID NO: 66155 - protein, 16 aa, Homo sapiens
CARASTVTTRALFDSW

SEQ ID NO: 66156 - protein, 21 aa, Homo sapiens
CTKDMGGGYNYRHGNDYFDYW

SEQ ID NO: 66157 - protein, 15 aa, Homo sapiens
CQVWDISTGIYSGVF

SEQ ID NO: 66158 - protein, 17 aa, Homo sapiens
CASLIQQWLDFYYFDYW

SEQ ID NO: 66159 - protein, 21 aa, Homo sapiens
CARGRIMITFGGVIVTYFDYW

SEQ ID NO: 66160 - protein, 14 aa, Homo sapiens
CARRYDPRVGFDYW

SEQ ID NO: 66161 - protein, 19 aa, Homo sapiens
CSRLFSCCTTTDWYCFDSW

SEQ ID NO: 66162 - protein, 25 aa, Homo sapiens
CARDRVAQQNSFDSGSAPDDAFDVW

SEQ ID NO: 66163 - protein, 21 aa, Homo sapiens
CARIPIYCSSTSCYRYYFDYW

SEQ ID NO: 66164 - protein, 17 aa, Homo sapiens
CGGDCYNLLIDDAFDIW

SEQ ID NO: 66165 - protein, 17 aa, Homo sapiens
CARPDTVFAVVEYFHNW

SEQ ID NO: 66166 - protein, 17 aa, Homo sapiens
CVRLYCDGGICNPLDYW

SEQ ID NO: 66167 - protein, 18 aa, Homo sapiens
CAKEFTIFGVVGPYFDDW

SEQ ID NO: 66168 - protein, 14 aa, Homo sapiens
CARGVAGTREVDYW

SEQ ID NO: 66169 - protein, 16 aa, Homo sapiens
CASEHLIWYGYPFAYW

SEQ ID NO: 66170 - protein, 15 aa, Homo sapiens
CTTGSLGFSTYFDYW

SEQ ID NO: 66171 - protein, 23 aa, Homo sapiens
CARDITPSEIFGVVHRYYAMDVW

SEQ ID NO: 66172 - protein, 19 aa, Homo sapiens
CARDSYGSGRSYYYGMDVW

SEQ ID NO: 66173 - protein, 15 aa, Homo sapiens
CARAQLTVSPSFDYW

SEQ ID NO: 66174 - protein, 16 aa, Homo sapiens
CGRIEVGSATKGIDYW

SEQ ID NO: 66175 - protein, 17 aa, Homo sapiens
CAKDGATVVSHEYFQHW

SEQ ID NO: 66176 - protein, 17 aa, Homo sapiens
CARIAAASYYYYYMDVW

SEQ ID NO: 66177 - protein, 17 aa, Homo sapiens
CARDRAERSYYYGMDVW

SEQ ID NO: 66178 - protein, 18 aa, Homo sapiens
CAKDLGFDYSISQAFDVW

SEQ ID NO: 66179 - protein, 24 aa, Homo sapiens
CARDTLICSSTSCRHYYYYGMDVW

SEQ ID NO: 66180 - protein, 18 aa, Homo sapiens
CAREMRITIYGVGSVDYW

SEQ ID NO: 66181 - protein, 19 aa, Homo sapiens
CARDNGKEDGNWVEAFDIW

SEQ ID NO: 66182 - protein, 22 aa, Homo sapiens
CARVKKGVPAHRYYYYYGMDVW

SEQ ID NO: 66183 - protein, 19 aa, Homo sapiens
CARPGISSDVYYYYGLDVW

SEQ ID NO: 66184 - protein, 12 aa, Homo sapiens
CTSNGWYTLDYW

SEQ ID NO: 66185 - protein, 25 aa, Homo sapiens
CARSLDPLHYYDASPKTQLYSFDIW

SEQ ID NO: 66186 - protein, 21 aa, Homo sapiens
CTTYRVNQWLPQAVYWYFDLW

SEQ ID NO: 66187 - protein, 20 aa, Homo sapiens
CARAGIGVIIMYYYYYMDVW

SEQ ID NO: 66188 - protein, 20 aa, Homo sapiens
CAKLLWFADLPPIYWYFELW

SEQ ID NO: 66189 - protein, 18 aa, Homo sapiens
CTKDPLSFSTIGYYFDFW

SEQ ID NO: 66190 - protein, 23 aa, Homo sapiens
CARVGWLRGVGATTSPPYYFDYW

SEQ ID NO: 66191 - protein, 17 aa, Homo sapiens
CVRGYGMLNPTVYFDPW

SEQ ID NO: 66192 - protein, 14 aa, Homo sapiens
CASLIVVVDAFDMW

SEQ ID NO: 66193 - protein, 13 aa, Homo sapiens
CARVSVPGYPDYW

SEQ ID NO: 66194 - protein, 18 aa, Homo sapiens
CAKGNYDILTGYPQFDYW

SEQ ID NO: 66195 - protein, 19 aa, Homo sapiens
CARPYSSWYGRDRNWFDPW

SEQ ID NO: 66196 - protein, 14 aa, Homo sapiens
CARKHWWNETLDYW

SEQ ID NO: 66197 - protein, 18 aa, Homo sapiens
CTREPEMATINFIFGDYW

SEQ ID NO: 66198 - protein, 19 aa, Homo sapiens
CARHRADYGGNSYWYFDLW

SEQ ID NO: 66199 - protein, 26 aa, Homo sapiens
CARVGGVYDSSGYYYGIKTVDWFDPW

SEQ ID NO: 66200 - protein, 16 aa, Homo sapiens
CAVDLNHGISYYLDYW

SEQ ID NO: 66201 - protein, 19 aa, Homo sapiens
CARDPVAWSIVVVPVFDYW

SEQ ID NO: 66202 - protein, 17 aa, Homo sapiens
CARDQGSYRAPYYFDQW

SEQ ID NO: 66203 - protein, 16 aa, Homo sapiens
CARDHFDNNGWKTDYW

SEQ ID NO: 66204 - protein, 12 aa, Homo sapiens
CEEYNNWPTHTF

SEQ ID NO: 66205 - protein, 21 aa, Homo sapiens
CAKEGSNDYGSMTHGFAFDIW

SEQ ID NO: 66206 - protein, 24 aa, Homo sapiens
CARATLPNRVYYDFWSGYQPFDYW

SEQ ID NO: 66207 - protein, 21 aa, Homo sapiens
CAHTTLVLSSGWYWAPWFDPW

SEQ ID NO: 66208 - protein, 21 aa, Homo sapiens
CARDPPIQLWSEYYYYGMDVW

SEQ ID NO: 66209 - protein, 18 aa, Homo sapiens
CAREHRGTYRYYFYMDVW

SEQ ID NO: 66210 - protein, 25 aa, Homo sapiens
CARVNGLDYDSSGYYSSREYYFDYW

SEQ ID NO: 66211 - protein, 17 aa, Homo sapiens
CARHVSPRLPVAGYDYW

SEQ ID NO: 66212 - protein, 19 aa, Homo sapiens
CAKSSDGYYGTESSPFDYW

SEQ ID NO: 66213 - protein, 18 aa, Homo sapiens
CARTRPGGQYYYYKMDVW

SEQ ID NO: 66214 - protein, 23 aa, Homo sapiens
CATSDPYYYDSSGYYPMGYFQHW

SEQ ID NO: 66215 - protein, 24 aa, Homo sapiens
CAKDGLYRSSLYDRYYYYYYMDVW

SEQ ID NO: 66216 - protein, 23 aa, Homo sapiens
CAKDGGGIFGVVTNYYYYYMDVW

SEQ ID NO: 66217 - protein, 20 aa, Homo sapiens
CARDSSNWYLPRGDHAFDIW

SEQ ID NO: 66218 - protein, 15 aa, Homo sapiens
CARDLQQVVFAFDIW

SEQ ID NO: 66219 - protein, 18 aa, Homo sapiens
CANCLSGSYESPFWFDPW

SEQ ID NO: 66220 - protein, 19 aa, Homo sapiens
CARFLYDFENGPPGQTDYW

SEQ ID NO: 66221 - protein, 18 aa, Homo sapiens
CATQRGSHYYGSGSLDYW

SEQ ID NO: 66222 - protein, 16 aa, Homo sapiens
CAMFVSRVVYNYFDPW

SEQ ID NO: 66223 - protein, 16 aa, Homo sapiens
CGSHDYGASAGYFLRW

SEQ ID NO: 66224 - protein, 16 aa, Homo sapiens
CELRKLWFGETVADYW

SEQ ID NO: 66225 - protein, 13 aa, Homo sapiens
CGRLGELSLTDYW

SEQ ID NO: 66226 - protein, 25 aa, Homo sapiens
CAKDGVEVATTGTLTSYYYYGMDVW

SEQ ID NO: 66227 - protein, 15 aa, Homo sapiens
CARGDLRQLPRYDYW

SEQ ID NO: 66228 - protein, 21 aa, Homo sapiens
CTRADSSGWYGYYYYYYMDVW

SEQ ID NO: 66229 - protein, 19 aa, Homo sapiens
CARAGFRSDWNDVGYFDYW

SEQ ID NO: 66230 - protein, 20 aa, Homo sapiens
CARGYWNYVEVYYYYYMDVW

SEQ ID NO: 66231 - protein, 18 aa, Homo sapiens
CAKTLGQYSGSYHYFDYW

SEQ ID NO: 66232 - protein, 18 aa, Homo sapiens
CARLYDFWSSGYYYMDVW

SEQ ID NO: 66233 - protein, 19 aa, Homo sapiens
CARDSMQLWLNYYFYMDVW

SEQ ID NO: 66234 - protein, 25 aa, Homo sapiens
CARSLGYCSGDNCHYFLPNDAFDIW

SEQ ID NO: 66235 - protein, 19 aa, Homo sapiens
CASFTLGGGYSISYYFDYW

SEQ ID NO: 66236 - protein, 15 aa, Homo sapiens
CARDGKYSSSYLDYW

SEQ ID NO: 66237 - protein, 17 aa, Homo sapiens
CAKANMVRGGTYYFDSW

SEQ ID NO: 66238 - protein, 17 aa, Homo sapiens
CARDLKQWLGTGWFDPW

SEQ ID NO: 66239 - protein, 18 aa, Homo sapiens
CVKDERAIFGLGGSFDLW

SEQ ID NO: 66240 - protein, 14 aa, Homo sapiens
CARGQWLVRYFDLW

SEQ ID NO: 66241 - protein, 16 aa, Homo sapiens
CARTRYNWTGLGLDYW

SEQ ID NO: 66242 - protein, 12 aa, Homo sapiens
CTKSSNWNFDFW

SEQ ID NO: 66243 - protein, 21 aa, Homo sapiens
CARDREYQDSSAYSTYYFDYW

SEQ ID NO: 66244 - protein, 15 aa, Homo sapiens
CARLNIRRGVALDYW

SEQ ID NO: 66245 - protein, 21 aa, Homo sapiens
CARAGLHPFGWRFSSSGFGYW

SEQ ID NO: 66246 - protein, 14 aa, Homo sapiens
CAKAKESGSAYDIW

SEQ ID NO: 66247 - protein, 20 aa, Homo sapiens
CARGRFLEWLPGVDKSFDYW

SEQ ID NO: 66248 - protein, 23 aa, Homo sapiens
CARDSLYYYGSGSFLWGPNFDYW

SEQ ID NO: 66249 - protein, 20 aa, Homo sapiens
CARDHHGSGFYKSYWYFDLW

SEQ ID NO: 66250 - protein, 21 aa, Homo sapiens
CARGGDIVVVVAATRSALDIW

SEQ ID NO: 66251 - protein, 19 aa, Homo sapiens
CATETVLRFLEWLLPFDPW

SEQ ID NO: 66252 - protein, 24 aa, Homo sapiens
CARGFPLRYCSGGSCYSGGGFDYW

SEQ ID NO: 66253 - protein, 20 aa, Homo sapiens
CARAEPFGYNYFRGYYFDYW

SEQ ID NO: 66254 - protein, 16 aa, Homo sapiens
CVKDSTTDYGYYLEYW

SEQ ID NO: 66255 - protein, 21 aa, Homo sapiens
CARDPHPGGPEYYYYYYMDVW

SEQ ID NO: 66256 - protein, 20 aa, Homo sapiens
CAREQVYCGSMACYEWFDPW

SEQ ID NO: 66257 - protein, 19 aa, Homo sapiens
CARTRDIKIAVINDGFDVW

SEQ ID NO: 66258 - protein, 20 aa, Homo sapiens
CAADGCTNGVCEEVNWFDPW

SEQ ID NO: 66259 - protein, 27 aa, Homo sapiens
CARDLSCDRYYDFWSGYSCSLDAFDIW

SEQ ID NO: 66260 - protein, 12 aa, Homo sapiens
CQQYKTYSPWPF

SEQ ID NO: 66261 - protein, 17 aa, Homo sapiens
CARGSSYGKRGSYFDYW

SEQ ID NO: 66262 - protein, 21 aa, Homo sapiens
CASDYYDSSGYYSQSHHFDYW

SEQ ID NO: 66263 - protein, 17 aa, Homo sapiens
CAKDCSSPTCDDAFDIW

SEQ ID NO: 66264 - protein, 15 aa, Homo sapiens
CARGQSYSNIYFDYW

SEQ ID NO: 66265 - protein, 18 aa, Homo sapiens
CAKGGYCSSTSCRYFDYW

SEQ ID NO: 66266 - protein, 15 aa, Homo sapiens
CATGGTNGYYPFDSW

SEQ ID NO: 66267 - protein, 23 aa, Homo sapiens
CAKTAARRVYDFWSGYMYYFDYW

SEQ ID NO: 66268 - protein, 23 aa, Homo sapiens
CARGVSTVNGPRGWYYYYGMDVW

SEQ ID NO: 66269 - protein, 14 aa, Homo sapiens
CSSYAGSYIVGLLF

SEQ ID NO: 66270 - protein, 11 aa, Homo sapiens
CVQEWQRLDYW

SEQ ID NO: 66271 - protein, 17 aa, Homo sapiens
CARDPKAGSFTQPFDYW

SEQ ID NO: 66272 - protein, 14 aa, Homo sapiens
CQSFDSSLGGFCVF

SEQ ID NO: 66273 - protein, 19 aa, Homo sapiens
CARIPYYYASSGLGGFDYW

SEQ ID NO: 66274 - protein, 20 aa, Homo sapiens
CARWDIVVVPAATKGAFDIW

SEQ ID NO: 66275 - protein, 22 aa, Homo sapiens
CATVQEHYYDFWSGPKGGFDYW

SEQ ID NO: 66276 - protein, 14 aa, Homo sapiens
CARLMPYDFAFDYW

SEQ ID NO: 66277 - protein, 16 aa, Homo sapiens
CATGAVYSGYDWVDYW

SEQ ID NO: 66278 - protein, 15 aa, Homo sapiens
CAIHYYDISESIDYW

SEQ ID NO: 66279 - protein, 16 aa, Homo sapiens
CARDSGIAAVYYMDVW

SEQ ID NO: 66280 - protein, 26 aa, Homo sapiens
CAREGSGDFWSGYPSRYYYYYYMDVW

SEQ ID NO: 66281 - protein, 20 aa, Homo sapiens
CARDRYCSATSCSTYFCDYW

SEQ ID NO: 66282 - protein, 20 aa, Homo sapiens
CAREEVVDSSGWTNDAFDVW

SEQ ID NO: 66283 - protein, 16 aa, Homo sapiens
CARGEGSMSYDAFDVW

SEQ ID NO: 66284 - protein, 19 aa, Homo sapiens
CASLEPPLTGARDDAFDIW

SEQ ID NO: 66285 - protein, 19 aa, Homo sapiens
CARGRYLLWFGEFQLFDYW

SEQ ID NO: 66286 - protein, 18 aa, Homo sapiens
CARHIGPAAKGMDWFDPW

SEQ ID NO: 66287 - protein, 23 aa, Homo sapiens
CARSFHIVDLRFSEWSQWYFDLW

SEQ ID NO: 66288 - protein, 19 aa, Homo sapiens
CAKGGDTASRYLPPNFDYW

SEQ ID NO: 66289 - protein, 19 aa, Homo sapiens
CARDSRISSEYWSGRLDYW

SEQ ID NO: 66290 - protein, 18 aa, Homo sapiens
CARDRDTMVRGVNAFDIW

SEQ ID NO: 66291 - protein, 22 aa, Homo sapiens
CARDWFLFPSSASEVDYYFDSW

SEQ ID NO: 66292 - protein, 26 aa, Homo sapiens
CAKERLSCSSTSCYLYYYYYYGMDVW

SEQ ID NO: 66293 - protein, 16 aa, Homo sapiens
CAKDDSMSWYNFFDSW

SEQ ID NO: 66294 - protein, 17 aa, Homo sapiens
CARDWGGYRGFYYFDYW

SEQ ID NO: 66295 - protein, 18 aa, Homo sapiens
CARLVGVLSYYYYGMDVW

SEQ ID NO: 66296 - protein, 25 aa, Homo sapiens
CARDRRYCGGDCYTAHYYYYGMDVW

SEQ ID NO: 66297 - protein, 24 aa, Homo sapiens
CARQIRDMIVVVITYYYYYYMDVW

SEQ ID NO: 66298 - protein, 16 aa, Homo sapiens
CATETMGYTYGNFDYW

SEQ ID NO: 66299 - protein, 17 aa, Homo sapiens
CARHSYVVATKDAFDIW

SEQ ID NO: 66300 - protein, 22 aa, Homo sapiens
CARDGVEENGSGWFYNWYFDLW

SEQ ID NO: 66301 - protein, 20 aa, Homo sapiens
CATLDCSHTGCYAGEYFRHW

SEQ ID NO: 66302 - protein, 23 aa, Homo sapiens
CATSHLGYTSSWLARTEHAFDVW

SEQ ID NO: 66303 - protein, 18 aa, Homo sapiens
CARSRVVVPETLRWFDPW

SEQ ID NO: 66304 - protein, 16 aa, Homo sapiens
CARDLGAAAGLNFDYW

SEQ ID NO: 66305 - protein, 24 aa, Homo sapiens
CARSPLEEITIFGVVTKSYYMDVW

SEQ ID NO: 66306 - protein, 18 aa, Homo sapiens
CAREGRSSSWAIAEIDYW

SEQ ID NO: 66307 - protein, 16 aa, Homo sapiens
CARMFIAVAGTAVDYW

SEQ ID NO: 66308 - protein, 24 aa, Homo sapiens
CARDSLVVPAANRLNYYYYGMDVW

SEQ ID NO: 66309 - protein, 13 aa, Homo sapiens
CTHGSGSSHFDYW

SEQ ID NO: 66310 - protein, 26 aa, Homo sapiens
CARDLKAYDYSYGLSAYYYYYGMDVW

SEQ ID NO: 66311 - protein, 25 aa, Homo sapiens
CTRDFGGLRFVEYFSPTEADTFDIW

SEQ ID NO: 66312 - protein, 22 aa, Homo sapiens
CALLHEGDYYFDSHGYSGFDYW

SEQ ID NO: 66313 - protein, 19 aa, Homo sapiens
CARSSGYSGFDLADGFDVW

SEQ ID NO: 66314 - protein, 20 aa, Homo sapiens
CAKEAEGGSWDLRDDAFDIW

SEQ ID NO: 66315 - protein, 22 aa, Homo sapiens
CARGPFAYCSGGSCYSGGFDPW

SEQ ID NO: 66316 - protein, 20 aa, Homo sapiens
CARAGLITMFRVANLPFDYW

SEQ ID NO: 66317 - protein, 14 aa, Homo sapiens
CARTEYGDYTFDFW

SEQ ID NO: 66318 - protein, 13 aa, Homo sapiens
CNSRDNIGNHPIF

SEQ ID NO: 66319 - protein, 16 aa, Homo sapiens
CAKLVRGLIIPYFDYW

SEQ ID NO: 66320 - protein, 25 aa, Homo sapiens
CARVAYYGSGSYYNPNYYYYGMDVW

SEQ ID NO: 66321 - protein, 16 aa, Homo sapiens
CAKSSGYYFQVAFDIW

SEQ ID NO: 66322 - protein, 20 aa, Homo sapiens
CARDPDDSSGYPVTHPFDYW

SEQ ID NO: 66323 - protein, 17 aa, Homo sapiens
CVRGNYKSYYYYYMDFW

SEQ ID NO: 66324 - protein, 17 aa, Homo sapiens
CAKEENQLGRRGAFDVW

SEQ ID NO: 66325 - protein, 17 aa, Homo sapiens
CARDRVTTIFSNWFDPW

SEQ ID NO: 66326 - protein, 19 aa, Homo sapiens
CASEHCDSGVCYSTGFDVW

SEQ ID NO: 66327 - protein, 23 aa, Homo sapiens
CAKDIDAGIAVAGTPPKLGLDYW

SEQ ID NO: 66328 - protein, 16 aa, Homo sapiens
CVKESGGSHGYYFDYW

SEQ ID NO: 66329 - protein, 17 aa, Homo sapiens
CARQQLVYHYYYGMDVW

SEQ ID NO: 66330 - protein, 15 aa, Homo sapiens
CATVTVPWYYYMDVW

SEQ ID NO: 66331 - protein, 19 aa, Homo sapiens
CASRVHCWSPTCPNAFDLW

SEQ ID NO: 66332 - protein, 17 aa, Homo sapiens
CARAMVRGVKLDAFDIW

SEQ ID NO: 66333 - protein, 20 aa, Homo sapiens
CAKDAEPMIAVDYYYGMDVW

SEQ ID NO: 66334 - protein, 23 aa, Homo sapiens
CARGMKSRAGFCAYGICSYFDYW

SEQ ID NO: 66335 - protein, 24 aa, Homo sapiens
CAQVTSLEVISSVVRSSAEHFHYW

SEQ ID NO: 66336 - protein, 17 aa, Homo sapiens
CARGGGSTWYSGYFDYW

SEQ ID NO: 66337 - protein, 21 aa, Homo sapiens
CASPLGITFGGVISDDAFDIW

SEQ ID NO: 66338 - protein, 27 aa, Homo sapiens
CARILFRRISSSPHAGYGDYAESFDYW

SEQ ID NO: 66339 - protein, 14 aa, Homo sapiens
CARSAYSYGPPDYW

SEQ ID NO: 66340 - protein, 19 aa, Homo sapiens
CARGYRSAVPSPSNWFDPW

SEQ ID NO: 66341 - protein, 18 aa, Homo sapiens
CARVPVWFGSQRPRFDPW

SEQ ID NO: 66342 - protein, 18 aa, Homo sapiens
CTTDLNDRSDYLDAYDIW

SEQ ID NO: 66343 - protein, 15 aa, Homo sapiens
CARDWRTTVTVLDYW

SEQ ID NO: 66344 - protein, 13 aa, Homo sapiens
CVKDMGGPGFDAW

SEQ ID NO: 66345 - protein, 16 aa, Homo sapiens
CARGGGREYFYELDYW

SEQ ID NO: 66346 - protein, 34 aa, Homo sapiens
CARDRRSSITIFGVVIPADLNVGAYYYYYGMDVW

SEQ ID NO: 66347 - protein, 20 aa, Homo sapiens
CARLPRRGDPQVEAEYFHHW

SEQ ID NO: 66348 - protein, 18 aa, Homo sapiens
CARKPDEYSSSSGAFDIW

SEQ ID NO: 66349 - protein, 17 aa, Homo sapiens
CARGAADYSSGWLLDYW

SEQ ID NO: 66350 - protein, 16 aa, Homo sapiens
CSTDPYDFWSRPDDYW

SEQ ID NO: 66351 - protein, 16 aa, Homo sapiens
CARGTEWLVRYYFDNW

SEQ ID NO: 66352 - protein, 15 aa, Homo sapiens
CARVWRYYYFAMDVW

SEQ ID NO: 66353 - protein, 18 aa, Homo sapiens
CARDRGAVAGPPAYFDYW

SEQ ID NO: 66354 - protein, 15 aa, Homo sapiens
CANQPYSSSWFFDYW

SEQ ID NO: 66355 - protein, 15 aa, Homo sapiens
CARDLVGANIPFDYW

SEQ ID NO: 66356 - protein, 20 aa, Homo sapiens
CARGQEIVVVLTVKVQFDSW

SEQ ID NO: 66357 - protein, 17 aa, Homo sapiens
CAKDMSRGGADDAFDIW

SEQ ID NO: 66358 - protein, 22 aa, Homo sapiens
CARCIMITFGGVISPLGVPDYW

SEQ ID NO: 66359 - protein, 16 aa, Homo sapiens
CARAVGPTTNDALDIW

SEQ ID NO: 66360 - protein, 13 aa, Homo sapiens
CARQQWLAHQDYW

SEQ ID NO: 66361 - protein, 13 aa, Homo sapiens
CGRVRAGWYVDYW

SEQ ID NO: 66362 - protein, 13 aa, Homo sapiens
CQSTDISGLLWLF

SEQ ID NO: 66363 - protein, 24 aa, Homo sapiens
CARYEGITIFGVVIRPHDDAFDIW

SEQ ID NO: 66364 - protein, 19 aa, Homo sapiens
CAKSSRSDYDFWSGYSDHW

SEQ ID NO: 66365 - protein, 17 aa, Homo sapiens
CAGHSNSAYYYYYLDLW

SEQ ID NO: 66366 - protein, 18 aa, Homo sapiens
CTTVLAIFGVVIIDFDYW

SEQ ID NO: 66367 - protein, 17 aa, Homo sapiens
CAKSLEIVVVSLNFDYW

SEQ ID NO: 66368 - protein, 25 aa, Homo sapiens
CARPNIAIGNFYDSSTYRFDAFDIW

SEQ ID NO: 66369 - protein, 18 aa, Homo sapiens
CAKDIGRVGIVWFAFDIW

SEQ ID NO: 66370 - protein, 24 aa, Homo sapiens
CARGPYCNDNNCYYGYYYYYMDVW

SEQ ID NO: 66371 - protein, 13 aa, Homo sapiens
CARGIGYARFDCW

SEQ ID NO: 66372 - protein, 23 aa, Homo sapiens
CATGQRGPRYYYDFSGSYSFDYW

SEQ ID NO: 66373 - protein, 20 aa, Homo sapiens
CAKGYSIFGVATAGGYFQHW

SEQ ID NO: 66374 - protein, 16 aa, Homo sapiens
CAKEREWLVGGWFDPW

SEQ ID NO: 66375 - protein, 17 aa, Homo sapiens
CATGGLTGSLDIWFDPW

SEQ ID NO: 66376 - protein, 22 aa, Homo sapiens
CARGSPTPHYDFWSGFGWFDPW

SEQ ID NO: 66377 - protein, 24 aa, Homo sapiens
CARDRVGAAQQVFPYYYYYGMDVW

SEQ ID NO: 66378 - protein, 17 aa, Homo sapiens
CARTPWDLRSLGGFDIW

SEQ ID NO: 66379 - protein, 16 aa, Homo sapiens
CVRDRSIGVASDFDYW

SEQ ID NO: 66380 - protein, 18 aa, Homo sapiens
CATTILTGRYYYYGLDVW

SEQ ID NO: 66381 - protein, 20 aa, Homo sapiens
CARVWSGSGSLYYYYYMDVW

SEQ ID NO: 66382 - protein, 14 aa, Homo sapiens
CAKHEEVWDAFEMW

SEQ ID NO: 66383 - protein, 21 aa, Homo sapiens
CAKVDRPLHNSNSGGDYFDSW

SEQ ID NO: 66384 - protein, 21 aa, Homo sapiens
CATVFYYDSSGYIGGEAFDIW

SEQ ID NO: 66385 - protein, 13 aa, Homo sapiens
CSNVFHGDYADFW

SEQ ID NO: 66386 - protein, 14 aa, Homo sapiens
CARNPYHQSFFDPW

SEQ ID NO: 66387 - protein, 16 aa, Homo sapiens
CAKAVTMIVSPAFDVW

SEQ ID NO: 66388 - protein, 15 aa, Homo sapiens
CAHSQPSLQLWLDYW

SEQ ID NO: 66389 - protein, 24 aa, Homo sapiens
CGRDGLSFGELQPPGYFYYGMDVW

SEQ ID NO: 66390 - protein, 13 aa, Homo sapiens
CQSFDSTNSLWVF

SEQ ID NO: 66391 - protein, 22 aa, Homo sapiens
CARGGWGRDGGDGYNLRYFDLW

SEQ ID NO: 66392 - protein, 18 aa, Homo sapiens
CARDFSSNAVWHDAFDIW

SEQ ID NO: 66393 - protein, 17 aa, Homo sapiens
CTRDPDGDPQPEDFQHW

SEQ ID NO: 66394 - protein, 15 aa, Homo sapiens
CARHWEERSVVFDYW

SEQ ID NO: 66395 - protein, 15 aa, Homo sapiens
CARDQYNGGWYQDYW

SEQ ID NO: 66396 - protein, 17 aa, Homo sapiens
CARTSLGGITGIFFDYW

SEQ ID NO: 66397 - protein, 19 aa, Homo sapiens
CATWPSNSDGYYYYGMDVW

SEQ ID NO: 66398 - protein, 15 aa, Homo sapiens
CAAMVAWTVNWFDPW

SEQ ID NO: 66399 - protein, 20 aa, Homo sapiens
CARDMSRIAAAGTRSEWDYW

SEQ ID NO: 66400 - protein, 19 aa, Homo sapiens
CASTSLGVVISGDEAFDIW

SEQ ID NO: 66401 - protein, 13 aa, Homo sapiens
CARERYGYYFEYW

SEQ ID NO: 66402 - protein, 16 aa, Homo sapiens
CARDNGYLSEGGFDYW

SEQ ID NO: 66403 - protein, 20 aa, Homo sapiens
CARAILVFPTDYSSGWFDPW

SEQ ID NO: 66404 - protein, 10 aa, Homo sapiens
CASLHEFDIW

SEQ ID NO: 66405 - protein, 19 aa, Homo sapiens
CATDRPTRASVTLGYFDYW

SEQ ID NO: 66406 - protein, 20 aa, Homo sapiens
CAKLGVPAANSLASDAFDIW

SEQ ID NO: 66407 - protein, 17 aa, Homo sapiens
CARRYPGQQLNPDFDYW

SEQ ID NO: 66408 - protein, 21 aa, Homo sapiens
CARDEEYRDIVIRGVTAFDSW

SEQ ID NO: 66409 - protein, 23 aa, Homo sapiens
CARVETTFYDALTGDSRLAFDIW

SEQ ID NO: 66410 - protein, 15 aa, Homo sapiens
CARGDGVDPYYLDLW

SEQ ID NO: 66411 - protein, 18 aa, Homo sapiens
CATLITIFGVVQFAFDIW

SEQ ID NO: 66412 - protein, 22 aa, Homo sapiens
CAREGGVVPAAKFYYYYYMDVW

SEQ ID NO: 66413 - protein, 18 aa, Homo sapiens
CATDGGYSGSLWRFFEYW

SEQ ID NO: 66414 - protein, 21 aa, Homo sapiens
CATDVGYSSSNGMVTNWFDPW

SEQ ID NO: 66415 - protein, 18 aa, Homo sapiens
CARHNCTNGVCENWFDPW

SEQ ID NO: 66416 - protein, 19 aa, Homo sapiens
CARLPGYGYGYFSYYMDVW

SEQ ID NO: 66417 - protein, 20 aa, Homo sapiens
CARDPGYDYGDYGFPLFDYW

SEQ ID NO: 66418 - protein, 12 aa, Homo sapiens [sequence omitted]

SEQ ID NO: 66419 - protein, 15 aa, Homo sapiens
CARGLGGSYRSVDYW

SEQ ID NO: 66420 - protein, 21 aa, Homo sapiens
CARGGSRTGYYLRITNWFDPW

SEQ ID NO: 66421 - protein, 15 aa, Homo sapiens
CARGGRPQENWLDPW

SEQ ID NO: 66422 - protein, 16 aa, Homo sapiens
CARDLDGYTYGYKDYW

SEQ ID NO: 66423 - protein, 18 aa, Homo sapiens
CAGTFSSGWQAARHFAYW

SEQ ID NO: 66424 - protein, 19 aa, Homo sapiens
CARSTSARLIRSYNWFDPW

SEQ ID NO: 66425 - protein, 13 aa, Homo sapiens
CARFLEARRVDYW

SEQ ID NO: 66426 - protein, 23 aa, Homo sapiens
CAHSPVRYYDILTGYPPGTFDIW

SEQ ID NO: 66427 - protein, 17 aa, Homo sapiens
CARDQVAAGYYYGMDVW

SEQ ID NO: 66428 - protein, 17 aa, Homo sapiens
CARISPEGTSCHKHDYW

SEQ ID NO: 66429 - protein, 21 aa, Homo sapiens
CARGGLQLRFLEWLPYYFDYW

SEQ ID NO: 66430 - protein, 15 aa, Homo sapiens
CARIGLMNSSGADYW

SEQ ID NO: 66431 - protein, 21 aa, Homo sapiens
CAKASGGHFVVVSAEYYFEYW

SEQ ID NO: 66432 - protein, 20 aa, Homo sapiens
CARDRFLRFLEWSKSAFDIW

SEQ ID NO: 66433 - protein, 17 aa, Homo sapiens
CARKEVGLRGVNAFDIW

SEQ ID NO: 66434 - protein, 19 aa, Homo sapiens
CATWGYDFSSSFSDYMDVW

SEQ ID NO: 66435 - protein, 21 aa, Homo sapiens
CARQYNDFWRGQSYPDYFDFW

SEQ ID NO: 66436 - protein, 13 aa, Homo sapiens
CATGVVPTTIDYW

SEQ ID NO: 66437 - protein, 23 aa, Homo sapiens
CARGPAPCTNGVCYMVPAHFDYW

SEQ ID NO: 66438 - protein, 22 aa, Homo sapiens
CARERLLTIFGVVIESSGFDYW

SEQ ID NO: 66439 - protein, 24 aa, Homo sapiens
CARDMNCSGGSCYRISYYYGMDVW

SEQ ID NO: 66440 - protein, 17 aa, Homo sapiens
CVRDVNSGYERYYFDKW

SEQ ID NO: 66441 - protein, 19 aa, Homo sapiens
CARVKSAYCGGDCYEIDYW

SEQ ID NO: 66442 - protein, 17 aa, Homo sapiens
CASHKGLLVADAEFDYW

SEQ ID NO: 66443 - protein, 16 aa, Homo sapiens
CARVLRGFIKDAFQIW

SEQ ID NO: 66444 - protein, 22 aa, Homo sapiens
CAKDMGDGYNRLYYYYYGMDVW

SEQ ID NO: 66445 - protein, 18 aa, Homo sapiens
CARMVDERIQLWWGVDYW

SEQ ID NO: 66446 - protein, 13 aa, Homo sapiens
CARGSPVVAYDYW

SEQ ID NO: 66447 - protein, 23 aa, Homo sapiens
CARDVGYSSSDAPLGGSFYLDSW

SEQ ID NO: 66448 - protein, 17 aa, Homo sapiens
CAKDRGVSDSYYTFDYW

SEQ ID NO: 66449 - protein, 19 aa, Homo sapiens
CANSLSSSAYGGYYGMDVW

SEQ ID NO: 66450 - protein, 18 aa, Homo sapiens
CANYLGQDVVVTAIFDYW

SEQ ID NO: 66451 - protein, 15 aa, Homo sapiens
CAKMDTSNPDYFESW

SEQ ID NO: 66452 - protein, 22 aa, Homo sapiens
CARVRGERTIFGVVTRTLFDYW

SEQ ID NO: 66453 - protein, 23 aa, Homo sapiens
CAREESLIPTMIVVVTAPGFDYW

SEQ ID NO: 66454 - protein, 19 aa, Homo sapiens
CARGTRLKFLSTNDVFDIW

SEQ ID NO: 66455 - protein, 14 aa, Homo sapiens
CGISRGAGKTVDYW

SEQ ID NO: 66456 - protein, 23 aa, Homo sapiens
CARDRVFDVVVVAAIGQDGMDVW

SEQ ID NO: 66457 - protein, 14 aa, Homo sapiens
CSGRGCDLDAFDMW

SEQ ID NO: 66458 - protein, 21 aa, Homo sapiens
CARDTTAMATGTYYYYGMDVW

SEQ ID NO: 66459 - protein, 14 aa, Homo sapiens
CQVWDSSSEYPWVF

SEQ ID NO: 66460 - protein, 18 aa, Homo sapiens
CAKDTSYHYRSLGSFHYW

SEQ ID NO: 66461 - protein, 18 aa, Homo sapiens
CARGDYSNSLTGEGFDYW

SEQ ID NO: 66462 - protein, 16 aa, Homo sapiens
CASLYGPGSSKFFDYW

SEQ ID NO: 66463 - protein, 19 aa, Homo sapiens
CARALWSRGVYYYYYMDVW

SEQ ID NO: 66464 - protein, 21 aa, Homo sapiens
CATIVSGITIFGVVIKGFDYW

SEQ ID NO: 66465 - protein, 22 aa, Homo sapiens
CAKDWPEGLIVVVPPAMPFAYW

SEQ ID NO: 66466 - protein, 26 aa, Homo sapiens
CARQKSRLLWNEFTTAYYYDWYFDLW

SEQ ID NO: 66467 - protein, 21 aa, Homo sapiens
CARGPIVAALVPYYYYYMDVW

SEQ ID NO: 66468 - protein, 16 aa, Homo sapiens
CARGSELAVAGPLDYW

SEQ ID NO: 66469 - protein, 21 aa, Homo sapiens
CARQQWECSRKPYCHSHFDFW

SEQ ID NO: 66470 - protein, 16 aa, Homo sapiens
CARDRITMVRDLFDYW

SEQ ID NO: 66471 - protein, 17 aa, Homo sapiens
CAKQGYCNSYSCLNDYW

SEQ ID NO: 66472 - protein, 17 aa, Homo sapiens
CVKDVSVDYDASHFDHW

SEQ ID NO: 66473 - protein, 22 aa, Homo sapiens
CARLNYDSSGSTNYYYYGMDVW

SEQ ID NO: 66474 - protein, 17 aa, Homo sapiens
CARGGSDYNYYYYMDVW

SEQ ID NO: 66475 - protein, 20 aa, Homo sapiens
CARNIIDSGYLRLMGAFDHW

SEQ ID NO: 66476 - protein, 22 aa, Homo sapiens
CARDRPQVDTIFGVATGGHDYW

SEQ ID NO: 66477 - protein, 18 aa, Homo sapiens
CAKVTQLYSYGSNWFDPW

SEQ ID NO: 66478 - protein, 19 aa, Homo sapiens
CAKGYTYYYDSSGYYWDYW

SEQ ID NO: 66479 - protein, 15 aa, Homo sapiens
CAGAYRYSYGNIDYW

SEQ ID NO: 66480 - protein, 16 aa, Homo sapiens
CARAIAVAGRWYFDLW

SEQ ID NO: 66481 - protein, 19 aa, Homo sapiens
CASPPPYLNGFRGGYFDSW

SEQ ID NO: 66482 - protein, 17 aa, Homo sapiens
CASSLGTGYYYYYMDVW

SEQ ID NO: 66483 - protein, 19 aa, Homo sapiens
CARVPNVWSGYYGDAFDIW

SEQ ID NO: 66484 - protein, 15 aa, Homo sapiens
CAREHSNFGGWLDPW

SEQ ID NO: 66485 - protein, 17 aa, Homo sapiens
CARDLHYASGSDAFDIW

SEQ ID NO: 66486 - protein, 23 aa, Homo sapiens
CARVNVLLWFGELSVREYYFDYW

SEQ ID NO: 66487 - protein, 18 aa, Homo sapiens
CAKDTEDCSSTSCYFDYW

SEQ ID NO: 66488 - protein, 23 aa, Homo sapiens
CARVGPLDYDFWSGYYPSEFDYW

SEQ ID NO: 66489 - protein, 21 aa, Homo sapiens
CAREYSSSWYEGLQFRYFDLW

SEQ ID NO: 66490 - protein, 16 aa, Homo sapiens
CAKLAQDSSGPGGDYW

SEQ ID NO: 66491 - protein, 16 aa, Homo sapiens
CARIWMNYYYYGMDVW

SEQ ID NO: 66492 - protein, 20 aa, Homo sapiens
CATLRFLEWLSKPGDAFDIW

SEQ ID NO: 66493 - protein, 32 aa, Homo sapiens
CALPILRTEDTAVYFCATGARRRYDFYYMDVW

SEQ ID NO: 66494 - protein, 18 aa, Homo sapiens
CAHADHLSDRADWYFDIW

SEQ ID NO: 66495 - protein, 17 aa, Homo sapiens
CARDRGYNYGLDGFDIW

SEQ ID NO: 66496 - protein, 20 aa, Homo sapiens
CARALITTFGVVSHDAFDIW

SEQ ID NO: 66497 - protein, 15 aa, Homo sapiens
CARTTMVRGVTIDYW

SEQ ID NO: 66498 - protein, 18 aa, Homo sapiens
CARESSYCGGDCSSFDSW

SEQ ID NO: 66499 - protein, 20 aa, Homo sapiens
CARDQLGMITFGEAVAFDIW

SEQ ID NO: 66500 - protein, 29 aa, Homo sapiens
CARDAKYYDILTGYFRSTNYYYYYGMDVW

SEQ ID NO: 66501 - protein, 15 aa, Homo sapiens
CAKDILPLVGAPDIW

SEQ ID NO: 66502 - protein, 20 aa, Homo sapiens
CVRVSEGNWNYVLGTAFDIW

SEQ ID NO: 66503 - protein, 22 aa, Homo sapiens
CVRSRDIVESYGKGIDEAFDVW

SEQ ID NO: 66504 - protein, 20 aa, Homo sapiens
CARAENYDFWNGYSNYMDVW

SEQ ID NO: 66505 - protein, 17 aa, Homo sapiens
CASDVSSWPRYNWFDPW

SEQ ID NO: 66506 - protein, 13 aa, Homo sapiens
CAREKIKYFLDYW

SEQ ID NO: 66507 - protein, 10 aa, Homo sapiens
CAIKYYCDYW

SEQ ID NO: 66508 - protein, 22 aa, Homo sapiens
CARSNYDILAGLSYYYYYMDVW

SEQ ID NO: 66509 - protein, 17 aa, Homo sapiens
CARDIGPGPSFYYMDVW

SEQ ID NO: 66510 - protein, 17 aa, Homo sapiens
CARAGQQLVTNNWFDPW

SEQ ID NO: 66511 - protein, 21 aa, Homo sapiens
CAKDASLSWYDFWSGYGYDYW

SEQ ID NO: 66512 - protein, 18 aa, Homo sapiens
CAKDLEEYADMATIFHYW

SEQ ID NO: 66513 - protein, 18 aa, Homo sapiens
CARLTGDPAPHYWYFDFW

SEQ ID NO: 66514 - protein, 16 aa, Homo sapiens
CARTYVPIVGSPLDYW

SEQ ID NO: 66515 - protein, 20 aa, Homo sapiens
CVKGPSIVGSPDGFDWFDPW

SEQ ID NO: 66516 - protein, 18 aa, Homo sapiens
CARDGTIDNWSPMPFDYW

SEQ ID NO: 66517 - protein, 17 aa, Homo sapiens
CAKDYFPYSNFFIFDSW

SEQ ID NO: 66518 - protein, 13 aa, Homo sapiens
CVVPAAQGIIDYW

SEQ ID NO: 66519 - protein, 19 aa, Homo sapiens
CARDLFKYGDYDAQGEDYW

SEQ ID NO: 66520 - protein, 21 aa, Homo sapiens
CARAEGRAVAGTTHNDAFDIW

SEQ ID NO: 66521 - protein, 14 aa, Homo sapiens
CAQERSGGAVFDSW

SEQ ID NO: 66522 - protein, 24 aa, Homo sapiens
CARENFDSDIYKNYNYYHYYMDVW

SEQ ID NO: 66523 - protein, 17 aa, Homo sapiens
CARDYFDSNGYYYVDYW

SEQ ID NO: 66524 - protein, 22 aa, Homo sapiens
CARVTPYYDFWSGYEDDAFDIW

SEQ ID NO: 66525 - protein, 15 aa, Homo sapiens
CARFRYGVARALDVW

SEQ ID NO: 66526 - protein, 20 aa, Homo sapiens
CARLYGFLEWLAAPGAFDPW

SEQ ID NO: 66527 - protein, 14 aa, Homo sapiens
CARPVTTSWYFDYW

SEQ ID NO: 66528 - protein, 19 aa, Homo sapiens
CARYCSGPSCHGANWFDPW

SEQ ID NO: 66529 - protein, 14 aa, Homo sapiens
CVGYFDWLSPFDYW

SEQ ID NO: 66530 - protein, 25 aa, Homo sapiens
CARDPTNTLLRITIFGVANPSFDYW

SEQ ID NO: 66531 - protein, 16 aa, Homo sapiens
CAYTHSSGYWGGFDYW

SEQ ID NO: 66532 - protein, 22 aa, Homo sapiens
CARRRAGLNTWYLGSFNWFDPW

SEQ ID NO: 66533 - protein, 30 aa, Homo sapiens
CAKDGTKYSAYDSGRTSLITGAREPWFDPW

SEQ ID NO: 66534 - protein, 21 aa, Homo sapiens
CARGPRVAAPYYYFSYGMDVW

SEQ ID NO: 66535 - protein, 19 aa, Homo sapiens
CARTPGIAVAGYEYYFDYW

SEQ ID NO: 66536 - protein, 21 aa, Homo sapiens
CAKDISDYYGSGTYLQYFDYW

SEQ ID NO: 66537 - protein, 15 aa, Homo sapiens
CARDASLQNDAFDIW

SEQ ID NO: 66538 - protein, 19 aa, Homo sapiens
CARHPLRYSLTCCNWFDFW

SEQ ID NO: 66539 - protein, 22 aa, Homo sapiens
CARDLSTNGADTNYYYYGMDVW

SEQ ID NO: 66540 - protein, 16 aa, Homo sapiens
CAKDSSGSYYNVGDYW

SEQ ID NO: 66541 - protein, 17 aa, Homo sapiens
CAHSKLGISDFDYFDHW

SEQ ID NO: 66542 - protein, 20 aa, Homo sapiens
CARVAYISSWFHLGNWFDPW

SEQ ID NO: 66543 - protein, 23 aa, Homo sapiens
CARKGAGYYDSSGYFLDDAFDIW

SEQ ID NO: 66544 - protein, 16 aa, Homo sapiens
CARDKMSSIWYAFDYW

SEQ ID NO: 66545 - protein, 14 aa, Homo sapiens
CARGYFDYSWFDPW

SEQ ID NO: 66546 - protein, 15 aa, Homo sapiens
CLRAPATAQYFFDYW

SEQ ID NO: 66547 - protein, 16 aa, Homo sapiens
CAHSRRMIYSSHFDYW

SEQ ID NO: 66548 - protein, 11 aa, Homo sapiens
CVHHNSYPLAF

SEQ ID NO: 66549 - protein, 18 aa, Homo sapiens
CARGAYYVSGRSEAFDVW

SEQ ID NO: 66550 - protein, 17 aa, Homo sapiens
CAKGKYGSVMIGCFDNW

SEQ ID NO: 66551 - protein, 15 aa, Homo sapiens
CARIGWERKRPFDYW

SEQ ID NO: 66552 - protein, 19 aa, Homo sapiens
CATDSVEGIAARLAAFDIW

SEQ ID NO: 66553 - protein, 19 aa, Homo sapiens
CARDPDITYRHYYYYMDVW

SEQ ID NO: 66554 - protein, 19 aa, Homo sapiens
CAKDRQGGDIIMSPWFDPW

SEQ ID NO: 66555 - protein, 19 aa, Homo sapiens
CAMGELKAWNYYGSRGDYW

SEQ ID NO: 66556 - protein, 15 aa, Homo sapiens
CARDSWDTSGRFDYW

SEQ ID NO: 66557 - protein, 17 aa, Homo sapiens
CARLSGVDSGWNRFDSW

SEQ ID NO: 66558 - protein, 20 aa, Homo sapiens
CATDRSPFGVDTFGNWFDPW

SEQ ID NO: 66559 - protein, 17 aa, Homo sapiens
CARTAIVVVPAPAMDVW

SEQ ID NO: 66560 - protein, 18 aa, Homo sapiens
CARAKRGEWLLWYYFDYW

SEQ ID NO: 66561 - protein, 20 aa, Homo sapiens
CARACPDYQGYCSGYAMDVW

SEQ ID NO: 66562 - protein, 15 aa, Homo sapiens
CGYAESYYYYGMDVW

SEQ ID NO: 66563 - protein, 16 aa, Homo sapiens
CAGSGEVGELLAFDPW

SEQ ID NO: 66564 - protein, 17 aa, Homo sapiens
CTKQRSGSYSWDYFDYW

SEQ ID NO: 66565 - protein, 30 aa, Homo sapiens
CATLAQITIFGVVIIEQVSGYDLGGRFDPW

SEQ ID NO: 66566 - protein, 20 aa, Homo sapiens
CARFGPGGYSYGEVDYFDYW

SEQ ID NO: 66567 - protein, 14 aa, Homo sapiens
CARGRVQKRYFDYW

SEQ ID NO: 66568 - protein, 19 aa, Homo sapiens
CTKSGARQNGVQQYYFDHW

SEQ ID NO: 66569 - protein, 18 aa, Homo sapiens
CASEGGLLEDYYYGMDVW

SEQ ID NO: 66570 - protein, 24 aa, Homo sapiens
CARDQRVTIFGVVNHYYYYYMDVW

SEQ ID NO: 66571 - protein, 15 aa, Homo sapiens
CAKARGSRWGSFDPW

SEQ ID NO: 66572 - protein, 20 aa, Homo sapiens
CARDSGLTGYINWPDAFDIW

SEQ ID NO: 66573 - protein, 15 aa, Homo sapiens
CAKDFTNGWAVADYW

SEQ ID NO: 66574 - protein, 15 aa, Homo sapiens
CAAQFRYSYGHLDYW

SEQ ID NO: 66575 - protein, 16 aa, Homo sapiens
CARDGMLGPEIAFNIW

SEQ ID NO: 66576 - protein, 19 aa, Homo sapiens
CARDPVEDYTSAPYYFDYW

SEQ ID NO: 66577 - protein, 16 aa, Homo sapiens
CASQNYYSSGTNFDYW

SEQ ID NO: 66578 - protein, 24 aa, Homo sapiens
CARESSRYCSSTSCVYTMGAFDIW

SEQ ID NO: 66579 - protein, 17 aa, Homo sapiens
CVRFGTEIGIRAGFDVW

SEQ ID NO: 66580 - protein, 26 aa, Homo sapiens
CATGLQGIPKYYDFWSDSKYTLFDYW

SEQ ID NO: 66581 - protein, 15 aa, Homo sapiens
CARWPLIVPHAFDIW

SEQ ID NO: 66582 - protein, 22 aa, Homo sapiens
CARDRWLPKNLKTLAANSFDSW

SEQ ID NO: 66583 - protein, 23 aa, Homo sapiens
CARGRGTYCTIGSCYFGYWFDPW

SEQ ID NO: 66584 - protein, 24 aa, Homo sapiens
CARDELHNFGSGNSYINHHYFNIW

SEQ ID NO: 66585 - protein, 17 aa, Homo sapiens
CTPGYCTSTSPRWLDPW

SEQ ID NO: 66586 - protein, 22 aa, Homo sapiens
CAKGDWYYYNQGHPGGGAFDIW

SEQ ID NO: 66587 - protein, 23 aa, Homo sapiens
CAKGYCSGGSCYLDYYYYGMDVW

SEQ ID NO: 66588 - protein, 14 aa, Homo sapiens
CAKGGGYDGRLDYW

SEQ ID NO: 66589 - protein, 21 aa, Homo sapiens
CARGRKGTIFGVVIIQDFDYW

SEQ ID NO: 66590 - protein, 18 aa, Homo sapiens
CAKDRGGSWVDAFYFDYW

SEQ ID NO: 66591 - protein, 19 aa, Homo sapiens
CASRYDILTGTTVGWFDPW

SEQ ID NO: 66592 - protein, 26 aa, Homo sapiens
CARDRGRKDCSGGSCYHYDYDGMDVW

SEQ ID NO: 66593 - protein, 16 aa, Homo sapiens
CARDDSSIRPEYFRHW

SEQ ID NO: 66594 - protein, 19 aa, Homo sapiens
CARSDLSETHWDSDAFDIW

SEQ ID NO: 66595 - protein, 23 aa, Homo sapiens
CARELPSYYDRIPSPGANWFDPW

SEQ ID NO: 66596 - protein, 13 aa, Homo sapiens
CSSYTSHSSLELF

SEQ ID NO: 66597 - protein, 18 aa, Homo sapiens
CAKDRPHGYEGDGNLDYW

SEQ ID NO: 66598 - protein, 16 aa, Homo sapiens
CAGTNSGTYAGRFDSW

SEQ ID NO: 66599 - protein, 16 aa, Homo sapiens
CTTDLVRLWGFAFDIW

SEQ ID NO: 66600 - protein, 20 aa, Homo sapiens
CVRVSRYENNSGFLESFDVW

SEQ ID NO: 66601 - protein, 17 aa, Homo sapiens
CARSGNRYYIHYYMDVW

SEQ ID NO: 66602 - protein, 18 aa, Homo sapiens
CASERQQYQLLTATFDYW

SEQ ID NO: 66603 - protein, 24 aa, Homo sapiens
CARETGRYYYDSSGYFFAYYMDVW

SEQ ID NO: 66604 - protein, 19 aa, Homo sapiens
CASQTPYSSHYYYYYMDVW

SEQ ID NO: 66605 - protein, 16 aa, Homo sapiens
CGRVCSTTSCSPFAYW

SEQ ID NO: 66606 - protein, 18 aa, Homo sapiens
CAREPGRGNVGHSTVDYW

SEQ ID NO: 66607 - protein, 20 aa, Homo sapiens
CAKASEYYFNSRVQWAPDYW

SEQ ID NO: 66608 - protein, 19 aa, Homo sapiens
CASHTSAWHRENAGYFDYW

SEQ ID NO: 66609 - protein, 22 aa, Homo sapiens
CARRRRITIFGVVIMVRGFDYW

SEQ ID NO: 66610 - protein, 17 aa, Homo sapiens
CARDGDSNYRPSAFDPW

SEQ ID NO: 66611 - protein, 16 aa, Homo sapiens
CASGSFASGRDYLDFW

SEQ ID NO: 66612 - protein, 17 aa, Homo sapiens
CARDRTVTTFDWYFDVW

SEQ ID NO: 66613 - protein, 21 aa, Homo sapiens
CARGGWLRFRGLPRHTYFDYW

SEQ ID NO: 66614 - protein, 15 aa, Homo sapiens
CARDGLDSGWYIDYW

SEQ ID NO: 66615 - protein, 17 aa, Homo sapiens
CATGSRLPLSRERLDYW

SEQ ID NO: 66616 - protein, 18 aa, Homo sapiens
CARDTLYVLSDSSGFDYW

SEQ ID NO: 66617 - protein, 19 aa, Homo sapiens
CVKDKWDSPTDSRGAFDIW

SEQ ID NO: 66618 - protein, 20 aa, Homo sapiens
CARVMWDYYDSSGYPFVDYW

SEQ ID NO: 66619 - protein, 20 aa, Homo sapiens
CTRDWGGSTVTTNGNWFDPW

SEQ ID NO: 66620 - protein, 20 aa, Homo sapiens
CARDINDIWSGNAADAFDSW

SEQ ID NO: 66621 - protein, 26 aa, Homo sapiens
CARHYPHRVHYCTNGVCYNGGWFDPW

SEQ ID NO: 66622 - protein, 18 aa, Homo sapiens
CARDGSDLTIFGVVFDYW

SEQ ID NO: 66623 - protein, 27 aa, Homo sapiens
CARTSFYYDILTGYYSPLYYYYGMDVW

SEQ ID NO: 66624 - protein, 15 aa, Homo sapiens
CAGPIETDSMFFDSW

SEQ ID NO: 66625 - protein, 20 aa, Homo sapiens
CARESSIVAERGYYYYMDVW

SEQ ID NO: 66626 - protein, 14 aa, Homo sapiens
CARLIRAGEKDDYW

SEQ ID NO: 66627 - protein, 22 aa, Homo sapiens
CATLAAWRSSWYEGGLYHFDQW

SEQ ID NO: 66628 - protein, 17 aa, Homo sapiens
CASSSGTYLDASLFHYW

SEQ ID NO: 66629 - protein, 18 aa, Homo sapiens
CTRSESGGYYFPDAFDIW

SEQ ID NO: 66630 - protein, 15 aa, Homo sapiens
CAKDLLDGYNNFDYW

SEQ ID NO: 66631 - protein, 22 aa, Homo sapiens
CAGAASYDYWSGYLGRDASDVW

SEQ ID NO: 66632 - protein, 16 aa, Homo sapiens
CVKGVVGASWGTLDYW

SEQ ID NO: 66633 - protein, 17 aa, Homo sapiens
CARIEASSGPRVAFDIW

SEQ ID NO: 66634 - protein, 15 aa, Homo sapiens
CAKLGAPSGSQFDYW

SEQ ID NO: 66635 - protein, 15 aa, Homo sapiens
CATTDYDDSGSFDYW

SEQ ID NO: 66636 - protein, 17 aa, Homo sapiens
CARQTGLNWSAFYLDIW

SEQ ID NO: 66637 - protein, 23 aa, Homo sapiens
CCSTSCHSCFTTIQEGSYAFDIW

SEQ ID NO: 66638 - protein, 18 aa, Homo sapiens
CAKAADLTWPLGPYFDYW

SEQ ID NO: 66639 - protein, 16 aa, Homo sapiens
CNVAVAPRPLFRFDYW

SEQ ID NO: 66640 - protein, 11 aa, Homo sapiens
CQQSYGTSYSF

SEQ ID NO: 66641 - protein, 19 aa, Homo sapiens
CAKDGGGPQGRVLDETDYW

SEQ ID NO: 66642 - protein, 24 aa, Homo sapiens
CARLGRQVLRFLESLEGEDALDIW

SEQ ID NO: 66643 - protein, 14 aa, Homo sapiens
CARMYAPTSCFDYW

SEQ ID NO: 66644 - protein, 25 aa, Homo sapiens
CARDLSELTGTTPGVRYYYYGMDVW

SEQ ID NO: 66645 - protein, 13 aa, Homo sapiens
CGTWDSNLGSMIF

SEQ ID NO: 66646 - protein, 22 aa, Homo sapiens
CAREKEEDVLRFLEWPLFFDYW

SEQ ID NO: 66647 - protein, 18 aa, Homo sapiens
CARGISSGSLKTYYFEYW

SEQ ID NO: 66648 - protein, 20 aa, Homo sapiens
CARVRYFGVNMGNGGSLDYW

SEQ ID NO: 66649 - protein, 21 aa, Homo sapiens
CARRSGEYCSGGSCYYWFDPW

SEQ ID NO: 66650 - protein, 23 aa, Homo sapiens
CSRAEVYSASSEGIYHYYGMDVW

SEQ ID NO: 66651 - protein, 17 aa, Homo sapiens
CARIRYDSIPQGGFDPW

SEQ ID NO: 66652 - protein, 13 aa, Homo sapiens
CIQGTHGPPMYAF

SEQ ID NO: 66653 - protein, 22 aa, Homo sapiens
CARAPSYYDSSGYSLGVPFDYW

SEQ ID NO: 66654 - protein, 18 aa, Homo sapiens
CAKIVAYRFLEWRWFDPW

SEQ ID NO: 66655 - protein, 19 aa, Homo sapiens
CARVAYISGAGLGHWFDPW

SEQ ID NO: 66656 - protein, 16 aa, Homo sapiens
CARTTIAARAGGLDYW

SEQ ID NO: 66657 - protein, 16 aa, Homo sapiens
CARHRGYTTLDAIDYW

SEQ ID NO: 66658 - protein, 17 aa, Homo sapiens
CAHRPPPSSSWFYFDYW

SEQ ID NO: 66659 - protein, 16 aa, Homo sapiens
CVRVRGYDYGSWFDPW

SEQ ID NO: 66660 - protein, 18 aa, Homo sapiens
CARGVGREFDYYYGMDVW

SEQ ID NO: 66661 - protein, 19 aa, Homo sapiens
CVKDSRVFRLGADYYFESW

SEQ ID NO: 66662 - protein, 20 aa, Homo sapiens
CAISPCIAAAGTAQNWFDPW

SEQ ID NO: 66663 - protein, 17 aa, Homo sapiens
CARGGWQHMTSPYFDNW

SEQ ID NO: 66664 - protein, 16 aa, Homo sapiens
CARDYDYYDISWLDYW

SEQ ID NO: 66665 - protein, 22 aa, Homo sapiens
CARETYYYDSSGYLGSDAFDIW

SEQ ID NO: 66666 - protein, 23 aa, Homo sapiens
CARVVGSHYYDSSGYYPDAFDIW

SEQ ID NO: 66667 - protein, 17 aa, Homo sapiens
CAKEPYSSGWYPNKDYW

SEQ ID NO: 66668 - protein, 20 aa, Homo sapiens
CATKGIGDNDFWSGYQWDYW

SEQ ID NO: 66669 - protein, 13 aa, Homo sapiens
CQSADRHGTNCVF

SEQ ID NO: 66670 - protein, 19 aa, Homo sapiens
CARCPPPRDGYNYVGFDYW

SEQ ID NO: 66671 - protein, 16 aa, Homo sapiens
CARLWQWESQHGFDYW

SEQ ID NO: 66672 - protein, 22 aa, Homo sapiens
CAKGTADYDFWGGYPLFYFDYW

SEQ ID NO: 66673 - protein, 17 aa, Homo sapiens
CAKAVRGSSSWSLFDYW

SEQ ID NO: 66674 - protein, 24 aa, Homo sapiens
CAREEYTIGELLSGSYYYYGMDVW

SEQ ID NO: 66675 - protein, 20 aa, Homo sapiens
CAREYYYDFWSGYYVPLDYW

SEQ ID NO: 66676 - protein, 18 aa, Homo sapiens
CARPSRPGLGYSVDFDYW

SEQ ID NO: 66677 - protein, 25 aa, Homo sapiens
CARDLGKARDDYEQEAYYYYGMDVW

SEQ ID NO: 66678 - protein, 21 aa, Homo sapiens
CARWGTVTTILGYYYYGMDVW

SEQ ID NO: 66679 - protein, 22 aa, Homo sapiens
CARSRVEFWSGNYYYYYYMDVW

SEQ ID NO: 66680 - protein, 20 aa, Homo sapiens
CNFWSGYIGNYYYYYGMDVW

SEQ ID NO: 66681 - protein, 20 aa, Homo sapiens
CARQDYDLLTGYYTASFDYW

SEQ ID NO: 66682 - protein, 16 aa, Homo sapiens
CVRVHLGATARYFDYW

SEQ ID NO: 66683 - protein, 28 aa, Homo sapiens
CAKDTAARYYDFWSGYSGLYYYYGMDVW

SEQ ID NO: 66684 - protein, 29 aa, Homo sapiens
CARGPCRDPSKVITMIRGVCRTGGRFDYW

SEQ ID NO: 66685 - protein, 12 aa, Homo sapiens
CQVVDSSGVYVF

SEQ ID NO: 66686 - protein, 16 aa, Homo sapiens
CARQSLFSTSPWEDSW

SEQ ID NO: 66687 - protein, 18 aa, Homo sapiens
CVRERPQSSGWSHYFDYW

SEQ ID NO: 66688 - protein, 20 aa, Homo sapiens
CARGYNYYDSSGYPYYFDYW

SEQ ID NO: 66689 - protein, 16 aa, Homo sapiens
CARHVDDHADPSFSYW

SEQ ID NO: 66690 - protein, 17 aa, Homo sapiens
CAKDKELGGITATFDFW

SEQ ID NO: 66691 - protein, 15 aa, Homo sapiens
CAKGFYDSGGYFDYW

SEQ ID NO: 66692 - protein, 12 aa, Homo sapiens
CQQYAEWPLPSF

SEQ ID NO: 66693 - protein, 16 aa, Homo sapiens
CVKDDKYTGNGWLDPW

SEQ ID NO: 66694 - protein, 21 aa, Homo sapiens
CARSLYDYDFWSGYYKLPDYW

SEQ ID NO: 66695 - protein, 20 aa, Homo sapiens
CARVNRIVVVIYSFYWFDPW

SEQ ID NO: 66696 - protein, 18 aa, Homo sapiens
CARSKRFRGRDPYAFDVW

SEQ ID NO: 66697 - protein, 12 aa, Homo sapiens
CARTLYSGFDFW

SEQ ID NO: 66698 - protein, 15 aa, Homo sapiens
CAKVDYYFSGTQDYW

SEQ ID NO: 66699 - protein, 20 aa, Homo sapiens
CARGHLWTTLFLFSDWFDPW

SEQ ID NO: 66700 - protein, 21 aa, Homo sapiens
CARDSTGYSYGFRVADAFDIW

SEQ ID NO: 66701 - protein, 29 aa, Homo sapiens
CARDFFVRAGLEPPLSLPAYYYYYGMDVW

SEQ ID NO: 66702 - protein, 21 aa, Homo sapiens
CARGDAPYYYDTRGYRHFDQW

SEQ ID NO: 66703 - protein, 19 aa, Homo sapiens
CTRADPLRRSTQCSPIDYW

SEQ ID NO: 66704 - protein, 16 aa, Homo sapiens
CARVKALGGTGNFDYW

SEQ ID NO: 66705 - protein, 26 aa, Homo sapiens
CARDLDSSPLGGLAALEGYFYYMDVW

SEQ ID NO: 66706 - protein, 17 aa, Homo sapiens
CARNPDYGDLGGYFDYW

SEQ ID NO: 66707 - protein, 18 aa, Homo sapiens
CSRGEEFDSGSYMWFDPW

SEQ ID NO: 66708 - protein, 16 aa, Homo sapiens
CARQLGVNTYAAFDIW

SEQ ID NO: 66709 - protein, 21 aa, Homo sapiens
CAKEGQSYDSDLYSYGYVDYW

SEQ ID NO: 66710 - protein, 17 aa, Homo sapiens
CARVLGIAAAGWWFDPW

SEQ ID NO: 66711 - protein, 17 aa, Homo sapiens
CARQGSRYGEMNCFDSW

SEQ ID NO: 66712 - protein, 18 aa, Homo sapiens
CARGSGTQGIAAADLDYW

SEQ ID NO: 66713 - protein, 18 aa, Homo sapiens
CAKGTDTGSYSRGPFDIW

SEQ ID NO: 66714 - protein, 17 aa, Homo sapiens
CARLCSSISCSMGVDYW

SEQ ID NO: 66715 - protein, 17 aa, Homo sapiens
CARDRGRVILTGYFTPW

SEQ ID NO: 66716 - protein, 17 aa, Homo sapiens
CARDPDYGDYAYYLDYW

SEQ ID NO: 66717 - protein, 18 aa, Homo sapiens
CASSFSLRGLWGGYFDYW

SEQ ID NO: 66718 - protein, 13 aa, Homo sapiens
CAHSDFLSGFDVW

SEQ ID NO: 66719 - protein, 23 aa, Homo sapiens
CARGPYDIWRGYSFPTHYYMDVW

SEQ ID NO: 66720 - protein, 16 aa, Homo sapiens
CTRKRHDILIEGSDYW

SEQ ID NO: 66721 - protein, 17 aa, Homo sapiens
CAKDITTVVTWGGFDYW

SEQ ID NO: 66722 - protein, 17 aa, Homo sapiens
CARHGLVSGYSLYCDYW

SEQ ID NO: 66723 - protein, 18 aa, Homo sapiens
CAKDGGEYSSGWSDFDYW

SEQ ID NO: 66724 - protein, 22 aa, Homo sapiens
CATPIFYCSGGSCYVSGAFDIW

SEQ ID NO: 66725 - protein, 13 aa, Homo sapiens
CAKGQQSYGLDYW

SEQ ID NO: 66726 - protein, 17 aa, Homo sapiens
CSSTGCTPNYYYGMDVW

SEQ ID NO: 66727 - protein, 16 aa, Homo sapiens
CATDLPVRGGYAFDIW

SEQ ID NO: 66728 - protein, 21 aa, Homo sapiens
CAKDRVGYSSRWHEGDLFHYW

SEQ ID NO: 66729 - protein, 26 aa, Homo sapiens
CARDSGPYYDFWSGYYSLPFDAFDIW

SEQ ID NO: 66730 - protein, 32 aa, Homo sapiens
CALPILRSDDTAVYYCARDVGVGGTLGVIDYW

SEQ ID NO: 66731 - protein, 11 aa, Homo sapiens
CMQATGFVWTF

SEQ ID NO: 66732 - protein, 19 aa, Homo sapiens
CASNVLLWFGELTYAFDIW

SEQ ID NO: 66733 - protein, 21 aa, Homo sapiens
CARDRPTYYDFWSGYYYMDVW

SEQ ID NO: 66734 - protein, 20 aa, Homo sapiens
CAREAITIFGEDYYYGMDVW

SEQ ID NO: 66735 - protein, 17 aa, Homo sapiens
CARVELALASIIIFDHW

SEQ ID NO: 66736 - protein, 15 aa, Homo sapiens
CAKDLATAAGLCDYW

SEQ ID NO: 66737 - protein, 24 aa, Homo sapiens
CARDLLVVVAATQNYYYYYGMDVW

SEQ ID NO: 66738 - protein, 16 aa, Homo sapiens
CARHYYDSSETAFDIW

SEQ ID NO: 66739 - protein, 18 aa, Homo sapiens
CAKVGEQWPRWYMGIDYW

SEQ ID NO: 66740 - protein, 18 aa, Homo sapiens
CALDYYDSSGYRRLFDYW

SEQ ID NO: 66741 - protein, 20 aa, Homo sapiens
CAREAAGPMVRGVPLYFDYW

SEQ ID NO: 66742 - protein, 18 aa, Homo sapiens
CATHYCSFTTCFWNVDYW

SEQ ID NO: 66743 - protein, 19 aa, Homo sapiens
CARDRYKGYDSTNYYFDYW

SEQ ID NO: 66744 - protein, 18 aa, Homo sapiens
CAKAPISSIVALGYFDDW

SEQ ID NO: 66745 - protein, 18 aa, Homo sapiens
CAAVSCSSTSCYDAFDIW

SEQ ID NO: 66746 - protein, 16 aa, Homo sapiens
CARSIATAGVLWFDPW

SEQ ID NO: 66747 - protein, 14 aa, Homo sapiens
CARIRAAVAAADYW

SEQ ID NO: 66748 - protein, 21 aa, Homo sapiens
CARHRYYSHTSGLNPDFFDYW

SEQ ID NO: 66749 - protein, 18 aa, Homo sapiens
CAKDKGGTRLVNNGFDYW

SEQ ID NO: 66750 - protein, 23 aa, Homo sapiens
CARDPGTTFIYDSFGTNWHFDLW

SEQ ID NO: 66751 - protein, 25 aa, Homo sapiens
CARESDALRFLDRRGPHYNYYMDVW

SEQ ID NO: 66752 - protein, 22 aa, Homo sapiens
CARAVYHFTDDILTGSNYFDLW

SEQ ID NO: 66753 - protein, 17 aa, Homo sapiens
CARDGRVAVPNDDFDVW

SEQ ID NO: 66754 - protein, 15 aa, Homo sapiens
CAKTLKWELLSFDYW

SEQ ID NO: 66755 - protein, 19 aa, Homo sapiens
CARSPIYSSSLHGGYFDLW

SEQ ID NO: 66756 - protein, 22 aa, Homo sapiens
CATGSHLHMVYDFLTGQYFDYW

SEQ ID NO: 66757 - protein, 17 aa, Homo sapiens
CARGLVGYSPRDAFDMW

SEQ ID NO: 66758 - protein, 34 aa, Homo sapiens
CARVFSTKLYCSSTSCYTRSGPLHTLRVYYFDYW

SEQ ID NO: 66759 - protein, 22 aa, Homo sapiens
CARQEDYYDSSGYSLGAAFDYW

SEQ ID NO: 66760 - protein, 25 aa, Homo sapiens
CARGGSSWGYRVLFSGYYYYYMDVW

SEQ ID NO: 66761 - protein, 21 aa, Homo sapiens
CARDSSRITMIVVVITDLDYW

SEQ ID NO: 66762 - protein, 36 aa, Homo sapiens
CMLYLQMNSLRTEDTAMYYCAKLRDYGDYNDALDFW

SEQ ID NO: 66763 - protein, 22 aa, Homo sapiens
CAHDSIKYYYESGGYHGAFDIW

SEQ ID NO: 66764 - protein, 13 aa, Homo sapiens
CARETAMVSFDYW

SEQ ID NO: 66765 - protein, 23 aa, Homo sapiens
CARVLGYVHGDYVLYYYYGMDVW

SEQ ID NO: 66766 - protein, 16 aa, Homo sapiens
CAKSLLTVAIDAFDIW

SEQ ID NO: 66767 - protein, 19 aa, Homo sapiens
CARHRHYYGSGSYYDPDYW

SEQ ID NO: 66768 - protein, 16 aa, Homo sapiens
CARRLTLSPSNWFDPW

SEQ ID NO: 66769 - protein, 17 aa, Homo sapiens
CAKDVGVVTINSGFDLW

SEQ ID NO: 66770 - protein, 15 aa, Homo sapiens
CARRYSRSSGAFDYW

SEQ ID NO: 66771 - protein, 18 aa, Homo sapiens
CVRDPPYSTEWNGVFDYW

SEQ ID NO: 66772 - protein, 18 aa, Homo sapiens
CARRGLFDNSRDWYFDLW

SEQ ID NO: 66773 - protein, 21 aa, Homo sapiens
CARDKEIQPLYSGYDYWIDSW

SEQ ID NO: 66774 - protein, 24 aa, Homo sapiens
CAKDHRGYYYGSGSYGGTDHFDYW

SEQ ID NO: 66775 - protein, 13 aa, Homo sapiens
CARYRSLASFDVW

SEQ ID NO: 66776 - protein, 20 aa, Homo sapiens
CARVGDPMVRGVTDLYFDYW

SEQ ID NO: 66777 - protein, 12 aa, Homo sapiens
CARIRLRYFDQW

SEQ ID NO: 66778 - protein, 16 aa, Homo sapiens
CARLLAAAGYKWFDPW

SEQ ID NO: 66779 - protein, 18 aa, Homo sapiens
CARGSSSGYYYVSYFDYW

SEQ ID NO: 66780 - protein, 19 aa, Homo sapiens
CARVRNYLLVVAAGWFDPW

SEQ ID NO: 66781 - protein, 18 aa, Homo sapiens
CAKVGDLYSSVPYYLDHW

SEQ ID NO: 66782 - protein, 15 aa, Homo sapiens
CAREVVITLPTFDYW

SEQ ID NO: 66783 - protein, 15 aa, Homo sapiens
CQSYDNSLSTSHVIF

SEQ ID NO: 66784 - protein, 17 aa, Homo sapiens
CASGRGRYSYESVFDYW

SEQ ID NO: 66785 - protein, 22 aa, Homo sapiens
CARDRMGITIFGVVIVDAFDIW

SEQ ID NO: 66786 - protein, 17 aa, Homo sapiens
CARVGTDDYYYYGMDVW

SEQ ID NO: 66787 - protein, 16 aa, Homo sapiens
CQSGDSSVTSFTPWVF

SEQ ID NO: 66788 - protein, 23 aa, Homo sapiens
CARSPRRCTTTRCYYFQYGMDVW

SEQ ID NO: 66789 - protein, 19 aa, Homo sapiens
CAADTYEDNGDFLDAFDIW

SEQ ID NO: 66790 - protein, 15 aa, Homo sapiens
CARIPYGGKVAADYW

SEQ ID NO: 66791 - protein, 23 aa, Homo sapiens
CARGPDFGVVIIPGTLVGWFDPW

SEQ ID NO: 66792 - protein, 21 aa, Homo sapiens
CAKGQTYYDFWSGYLYYMDVW

SEQ ID NO: 66793 - protein, 16 aa, Homo sapiens
CARTNYYDSSGSFDYW

SEQ ID NO: 66794 - protein, 15 aa, Homo sapiens
CATSAGDYNPFFDYW

SEQ ID NO: 66795 - protein, 19 aa, Homo sapiens
CARVVVEMATGEGFFFDYW

SEQ ID NO: 66796 - protein, 14 aa, Homo sapiens
CAKGAENYDFFDYW

SEQ ID NO: 66797 - protein, 18 aa, Homo sapiens
CAREGGGYELDPYFFDFW

SEQ ID NO: 66798 - protein, 23 aa, Homo sapiens
CATGYYDFWSGYPNTFRNWFDPW

SEQ ID NO: 66799 - protein, 17 aa, Homo sapiens
CAKVRDASGTAHPFDSW

SEQ ID NO: 66800 - protein, 20 aa, Homo sapiens
CAYASTYSGSYRPGYLFDIW

SEQ ID NO: 66801 - protein, 16 aa, Homo sapiens
CGASTTLYDYYYMDVW

SEQ ID NO: 66802 - protein, 24 aa, Homo sapiens
CASSQKAPRYYYDSSGYSGALDYW

SEQ ID NO: 66803 - protein, 22 aa, Homo sapiens
CARSYDLVLRFLEWLPWAFDYW

SEQ ID NO: 66804 - protein, 20 aa, Homo sapiens
CARARVGDSSGYYDDGMDVW

SEQ ID NO: 66805 - protein, 24 aa, Homo sapiens
CAKDTAWGYSSSSDGPGSYYFDYW

SEQ ID NO: 66806 - protein, 26 aa, Homo sapiens
CASEPRVATLRNFGKKGPSSLAPDYW

SEQ ID NO: 66807 - protein, 18 aa, Homo sapiens
CARGESFWSGSYSWFDPW

SEQ ID NO: 66808 - protein, 22 aa, Homo sapiens
CGWGTIFGVVIRASYYYYMDVW

SEQ ID NO: 66809 - protein, 18 aa, Homo sapiens
CAKDRYIVVVVAAWFDPW

SEQ ID NO: 66810 - protein, 12 aa, Homo sapiens
CQHRSKWPQYTF

SEQ ID NO: 66811 - protein, 37 aa, Homo sapiens
CALPILDSLRGGDTAVYYCAKDSRLFLMGADYHFDYW

SEQ ID NO: 66812 - protein, 14 aa, Homo sapiens
CARMMSRAVAHDYW

SEQ ID NO: 66813 - protein, 16 aa, Homo sapiens
CARIKRYQLPNYFDYW

SEQ ID NO: 66814 - protein, 21 aa, Homo sapiens
CARHLPYTIFPFVGWDYFDYW

SEQ ID NO: 66815 - protein, 15 aa, Homo sapiens
CATGYNYGESLFDHW

SEQ ID NO: 66816 - protein, 22 aa, Homo sapiens
CATAVDLGVWGSNRYAHQYDYW

SEQ ID NO: 66817 - protein, 24 aa, Homo sapiens
CARGGHLRCSGGSCYPGYNWFDPW

SEQ ID NO: 66818 - protein, 13 aa, Homo sapiens
CASLLQTRGFDLW

SEQ ID NO: 66819 - protein, 25 aa, Homo sapiens
CARAPTRYCSSTSCEGYYYYYMDVW

SEQ ID NO: 66820 - protein, 12 aa, Homo sapiens
CARDYWNAQDYW

SEQ ID NO: 66821 - protein, 17 aa, Homo sapiens
CARDPRIAARPYYFDYW

SEQ ID NO: 66822 - protein, 28 aa, Homo sapiens
CARGGWGSGGSCYSVSVRCYYYYYMDVW

SEQ ID NO: 66823 - protein, 17 aa, Homo sapiens
CASTNGGIAARSYFDYW

SEQ ID NO: 66824 - protein, 19 aa, Homo sapiens
CARSTAGIQLWSNYYFDYW

SEQ ID NO: 66825 - protein, 15 aa, Homo sapiens
CAHGLTGPSFYFDHW

SEQ ID NO: 66826 - protein, 17 aa, Homo sapiens
CANLSPAYGDYGAVDYW

SEQ ID NO: 66827 - protein, 15 aa, Homo sapiens
CARGGPGYISGLDYW

SEQ ID NO: 66828 - protein, 20 aa, Homo sapiens
CARHAKRWLQLGRGYYFDYW

SEQ ID NO: 66829 - protein, 13 aa, Homo sapiens
CAHGSPLAVADYW

SEQ ID NO: 66830 - protein, 13 aa, Homo sapiens
CQQYDPSPPTWTF

SEQ ID NO: 66831 - protein, 25 aa, Homo sapiens
CARDSREFGEVPAAMLSYYYGMDVW

SEQ ID NO: 66832 - protein, 18 aa, Homo sapiens
CAKVREMTIIGYCYFDYW

SEQ ID NO: 66833 - protein, 23 aa, Homo sapiens
CAKGFLRFGELNYYYYYYGMDVW

SEQ ID NO: 66834 - protein, 17 aa, Homo sapiens
CAKDLAPLYSYGYADYW

SEQ ID NO: 66835 - protein, 24 aa, Homo sapiens
CAKSSVVPALMGGNYYYYYYMDVW

SEQ ID NO: 66836 - protein, 21 aa, Homo sapiens
CAREGQSIVVVPAAIGAFDIW

SEQ ID NO: 66837 - protein, 22 aa, Homo sapiens
CAAGRSNTIFGVVIIPNWFDPW

SEQ ID NO: 66838 - protein, 24 aa, Homo sapiens
CARDPGIAAAGTRWDYYYYYMDVW

SEQ ID NO: 66839 - protein, 18 aa, Homo sapiens
CAKCDGDYARENWYFDLW

SEQ ID NO: 66840 - protein, 21 aa, Homo sapiens
CAYRYSGRPHSQKVNWYFDLW

SEQ ID NO: 66841 - protein, 12 aa, Homo sapiens
CASGYHIYFDYW

SEQ ID NO: 66842 - protein, 21 aa, Homo sapiens
CARDGGGSSWPAWYYYYMDVW

SEQ ID NO: 66843 - protein, 18 aa, Homo sapiens
CAKLGAVAGFGDWYFDLW

SEQ ID NO: 66844 - protein, 14 aa, Homo sapiens
CAKRSDLWLYFDFW

SEQ ID NO: 66845 - protein, 17 aa, Homo sapiens
CAGSAYYAYDSTYFDSW

SEQ ID NO: 66846 - protein, 23 aa, Homo sapiens
CARGHISSIAARFPPPPPAFDIW

SEQ ID NO: 66847 - protein, 17 aa, Homo sapiens
CARKSYSYGYLGAFDIW

SEQ ID NO: 66848 - protein, 14 aa, Homo sapiens
CARAPTWYEYFQHW

SEQ ID NO: 66849 - protein, 18 aa, Homo sapiens
CARRGFGLARRVDWFDPW

SEQ ID NO: 66850 - protein, 19 aa, Homo sapiens
CVRHLPGMTTVITYYFDDW

SEQ ID NO: 66851 - protein, 24 aa, Homo sapiens
CAKVSVGTIFGVVIHVTQYYFDYW

SEQ ID NO: 66852 - protein, 18 aa, Homo sapiens
CARHISGDFWSGLLFDYW

SEQ ID NO: 66853 - protein, 18 aa, Homo sapiens
CARPYTIYGGTAEYFQTW

SEQ ID NO: 66854 - protein, 16 aa, Homo sapiens
CARVWELLDPGAFDIW

SEQ ID NO: 66855 - protein, 15 aa, Homo sapiens
CARDQGHPNSGFDIW

SEQ ID NO: 66856 - protein, 27 aa, Homo sapiens
CARVLGGYCSTTRCYSSNFYYYYMDVW

SEQ ID NO: 66857 - protein, 22 aa, Homo sapiens
CARGPRAAAGLRRTKAAWFDPW

SEQ ID NO: 66858 - protein, 14 aa, Homo sapiens
CAKMDDSTGFFDYW

SEQ ID NO: 66859 - protein, 19 aa, Homo sapiens
CQQYDDLPYQQSDYLPYTF

SEQ ID NO: 66860 - protein, 17 aa, Homo sapiens
CARVMVGGSYYGAFDIW

SEQ ID NO: 66861 - protein, 17 aa, Homo sapiens
CAKGADWGYDKQVFDYW

SEQ ID NO: 66862 - protein, 21 aa, Homo sapiens
CARMGKGDCTNGVCYTALDYW

SEQ ID NO: 66863 - protein, 21 aa, Homo sapiens
CARDPDLLLWFGDHTRWFDPW

SEQ ID NO: 66864 - protein, 20 aa, Homo sapiens
CTRAAGWLSADYYYYYMDVW

SEQ ID NO: 66865 - protein, 21 aa, Homo sapiens
CARADREYSSSWGEKWWYDPW

SEQ ID NO: 66866 - protein, 18 aa, Homo sapiens
CARLPEQLVRGGYYFDYW

SEQ ID NO: 66867 - protein, 16 aa, Homo sapiens
CARALPEYQLLALDYW

SEQ ID NO: 66868 - protein, 15 aa, Homo sapiens
CARPFYNYYYAMDVW

SEQ ID NO: 66869 - protein, 21 aa, Homo sapiens
CARIEYDFWSASTYYYYMDVW

SEQ ID NO: 66870 - protein, 21 aa, Homo sapiens
CVRGARKGGAGILWRDPPDYW

SEQ ID NO: 66871 - protein, 16 aa, Homo sapiens
CARANYDSSGYYYGYW

SEQ ID NO: 66872 - protein, 19 aa, Homo sapiens
CARGGFRGIAAADYYFDYW

SEQ ID NO: 66873 - protein, 20 aa, Homo sapiens
CAKNTIHGGRYGVQYYFDSW

SEQ ID NO: 66874 - protein, 15 aa, Homo sapiens
CAKETLSTLGAFDYW

SEQ ID NO: 66875 - protein, 19 aa, Homo sapiens
CAKELGARGDYYYYGMDVW

SEQ ID NO: 66876 - protein, 17 aa, Homo sapiens
CAKGTYIDFWSGPLDYW

SEQ ID NO: 66877 - protein, 22 aa, Homo sapiens
CARDLHSSGSYGLDYYYGMDVW

SEQ ID NO: 66878 - protein, 16 aa, Homo sapiens
CAKGVVPTMKGSLDYW

SEQ ID NO: 66879 - protein, 11 aa, Homo sapiens
CAKGPGEHDYW

SEQ ID NO: 66880 - protein, 24 aa, Homo sapiens
CARGCVVPAARRKHYYYYYGMDVW

SEQ ID NO: 66881 - protein, 18 aa, Homo sapiens
CASPRGYFDWLSSPLDYW

SEQ ID NO: 66882 - protein, 13 aa, Homo sapiens [sequence omitted]

SEQ ID NO: 66883 - protein, 20 aa, Homo sapiens
CAKGAPWTSSSWYLGWFDPW

SEQ ID NO: 66884 - protein, 13 aa, Homo sapiens
CQQYGHSLHPITF

SEQ ID NO: 66885 - protein, 20 aa, Homo sapiens
CAKSYTYYYASSGSYVLDYW

SEQ ID NO: 66886 - protein, 16 aa, Homo sapiens
CARIPTLTTDLYMDYW

SEQ ID NO: 66887 - protein, 16 aa, Homo sapiens
CARVTTGDFRDPFDIW

SEQ ID NO: 66888 - protein, 13 aa, Homo sapiens
CARARYCIALDYW

SEQ ID NO: 66889 - protein, 16 aa, Homo sapiens
CARGPYVGSRTGFDPW

SEQ ID NO: 66890 - protein, 25 aa, Homo sapiens
CARLPGEGYDFWSGYYSTYYGMDVW

SEQ ID NO: 66891 - protein, 12 aa, Homo sapiens
CAASHVGPFDYW

SEQ ID NO: 66892 - protein, 18 aa, Homo sapiens
CATLGGSKGQAATPFDYW

SEQ ID NO: 66893 - protein, 19 aa, Homo sapiens
CARLPVTISGVVIDAFDFW

SEQ ID NO: 66894 - protein, 13 aa, Homo sapiens
CQAWDGSPASVVF

SEQ ID NO: 66895 - protein, 16 aa, Homo sapiens
CARDRSGSYLGGSDYW

SEQ ID NO: 66896 - protein, 20 aa, Homo sapiens
CVSTIGRHSPKVIGGAFDIW

SEQ ID NO: 66897 - protein, 14 aa, Homo sapiens
CARMVRDNWKFDFW

SEQ ID NO: 66898 - protein, 16 aa, Homo sapiens
CATGAVAAFFSCFDYW

SEQ ID NO: 66899 - protein, 20 aa, Homo sapiens
CARGRDIVVAPEDADPFDIW

SEQ ID NO: 66900 - protein, 24 aa, Homo sapiens
CARDPFYGDHCTNGVCSDDAFDIW

SEQ ID NO: 66901 - protein, 15 aa, Homo sapiens
CAKEYDSAWYNIDYW

SEQ ID NO: 66902 - protein, 18 aa, Homo sapiens
CARHGGYSYGYIDYFDNW

SEQ ID NO: 66903 - protein, 19 aa, Homo sapiens
CAKPLLRACCGGDLMLDYW

SEQ ID NO: 66904 - protein, 19 aa, Homo sapiens
CARDEDSTRGYYYYGMDVW

SEQ ID NO: 66905 - protein, 22 aa, Homo sapiens
CARDLVVVAATGAIHHNYFEYW

SEQ ID NO: 66906 - protein, 15 aa, Homo sapiens
CAREFRANSVAFDIW

SEQ ID NO: 66907 - protein, 19 aa, Homo sapiens
CAKDITVQLWLQTVSFDYW

SEQ ID NO: 66908 - protein, 16 aa, Homo sapiens
CAKVPEGGTYGNFDCW

SEQ ID NO: 66909 - protein, 17 aa, Homo sapiens
CARDHLSDAGTTPFDYW

SEQ ID NO: 66910 - protein, 20 aa, Homo sapiens
CAKDRYSLGEWLVPYWFDPW

SEQ ID NO: 66911 - protein, 18 aa, Homo sapiens
CATESQYYYDYHLNLDYW

SEQ ID NO: 66912 - protein, 15 aa, Homo sapiens
CAREFRVAEAGFDSW

SEQ ID NO: 66913 - protein, 17 aa, Homo sapiens
CATAGGSYYPPSDFDSW

SEQ ID NO: 66914 - protein, 14 aa, Homo sapiens
CNSRDSSDSHLRIF

SEQ ID NO: 66915 - protein, 19 aa, Homo sapiens
CATDKIFGVVINWVPFHYW

SEQ ID NO: 66916 - protein, 24 aa, Homo sapiens
CTRDSCTSSCYTTGDGAYYYMDVW

SEQ ID NO: 66917 - protein, 18 aa, Homo sapiens
CTSRSCSDYYYYYYMDVW

SEQ ID NO: 66918 - protein, 16 aa, Homo sapiens
CAREMGIITADAFDMW

SEQ ID NO: 66919 - protein, 21 aa, Homo sapiens
CARGVPNYDDGSATYSTFDLW

SEQ ID NO: 66920 - protein, 37 aa, Homo sapiens
CALPILNSLRTEDTAFYYCVKDDYYASGNFASNFDCW

SEQ ID NO: 66921 - protein, 20 aa, Homo sapiens
CATNLRFYYASSDYYYFQYW

SEQ ID NO: 66922 - protein, 16 aa, Homo sapiens
CTKDRSSGYPRLFDDW

SEQ ID NO: 66923 - protein, 17 aa, Homo sapiens
CAKDQPSAFDAEYFRDW

SEQ ID NO: 66924 - protein, 17 aa, Homo sapiens
CVKDKDPVGARYYFDYW

SEQ ID NO: 66925 - protein, 23 aa, Homo sapiens
CAREQSRYSSSSPFYFYYYMDVW

SEQ ID NO: 66926 - protein, 19 aa, Homo sapiens
CARPGLCGGDCHSTTFDVW

SEQ ID NO: 66927 - protein, 22 aa, Homo sapiens
CATDRRLVAAGWGYYYYYMNVW

SEQ ID NO: 66928 - protein, 19 aa, Homo sapiens
CAREMAYSDTTHRGGFDIW

SEQ ID NO: 66929 - protein, 16 aa, Homo sapiens
CARHFGPLTTARFDYW

SEQ ID NO: 66930 - protein, 18 aa, Homo sapiens
CARDLVGAYSAYDPFDFW

SEQ ID NO: 66931 - protein, 16 aa, Homo sapiens
CARVSVGAIGAHFDYW

SEQ ID NO: 66932 - protein, 20 aa, Homo sapiens
CARDWFPAMVTGYYYGMDVW

SEQ ID NO: 66933 - protein, 20 aa, Homo sapiens
CAKGASAWAWDYYFSALDVW

SEQ ID NO: 66934 - protein, 16 aa, Homo sapiens
CTKDSSSYSTQDFDSW

SEQ ID NO: 66935 - protein, 25 aa, Homo sapiens
CVRHLRFDSWSTFTAGRNYWYMDVW

SEQ ID NO: 66936 - protein, 15 aa, Homo sapiens
CARMQYSSSPHFDYW

SEQ ID NO: 66937 - protein, 23 aa, Homo sapiens
CARCSYDFWSGWSDYYYYYMDVW

SEQ ID NO: 66938 - protein, 19 aa, Homo sapiens
CAKLPYVWGSYRYGGFDYW

SEQ ID NO: 66939 - protein, 27 aa, Homo sapiens
CARGPLLKIAIFGVVTSDRETIYLDYW

SEQ ID NO: 66940 - protein, 19 aa, Homo sapiens
CATDGGHCDGSRCYTFDSW

SEQ ID NO: 66941 - protein, 15 aa, Homo sapiens
CARQYSGGRDAFDLW

SEQ ID NO: 66942 - protein, 23 aa, Homo sapiens
CARESGPASSPGIAVAGTRFVYW

SEQ ID NO: 66943 - protein, 23 aa, Homo sapiens
CARGSGFDSADPFRGSDYYFDLW

SEQ ID NO: 66944 - protein, 15 aa, Homo sapiens
CAKVRGDTSPNFDYW

SEQ ID NO: 66945 - protein, 18 aa, Homo sapiens
CARHIAWELSNYSYMDVW

SEQ ID NO: 66946 - protein, 20 aa, Homo sapiens
CARHVPGIAAAGTSYYMDVW

SEQ ID NO: 66947 - protein, 17 aa, Homo sapiens
CARSSAYSSSWSYPDYW

SEQ ID NO: 66948 - protein, 21 aa, Homo sapiens
CARTPYYDFWSGYAYYYMDVW

SEQ ID NO: 66949 - protein, 21 aa, Homo sapiens
CARVHGAVTPDYYYYYGMDVW

SEQ ID NO: 66950 - protein, 15 aa, Homo sapiens
CARREAALYYYMDVW

SEQ ID NO: 66951 - protein, 21 aa, Homo sapiens
CAKEAESSYYDSSDYQEPDYW

SEQ ID NO: 66952 - protein, 22 aa, Homo sapiens
CARDASSYCDVGLCPPYHLDYW

SEQ ID NO: 66953 - protein, 14 aa, Homo sapiens
CASWAVGALGFDYW

SEQ ID NO: 66954 - protein, 19 aa, Homo sapiens
CARGNRYYDRSGWVPFDYW

SEQ ID NO: 66955 - protein, 20 aa, Homo sapiens
CVKDREDSGFYLNPDGFDIW

SEQ ID NO: 66956 - protein, 19 aa, Homo sapiens
CVRDLTGLLERFVDAFDFW

SEQ ID NO: 66957 - protein, 16 aa, Homo sapiens
CAKGGWYSSSSGFDYW

SEQ ID NO: 66958 - protein, 18 aa, Homo sapiens
CARHLSDTIVATIYFDYW

SEQ ID NO: 66959 - protein, 19 aa, Homo sapiens
CARMNVVVPAAHWDWFDPW

SEQ ID NO: 66960 - protein, 15 aa, Homo sapiens
CQSYDSSLRGGYVVF

SEQ ID NO: 66961 - protein, 19 aa, Homo sapiens
CARDIVVVPELYYYGMDVW

SEQ ID NO: 66962 - protein, 26 aa, Homo sapiens
CAKDRGARLFGVVITDSYYYYGMDVW

SEQ ID NO: 66963 - protein, 15 aa, Homo sapiens
CVRIWRDGYSKGDYW

SEQ ID NO: 66964 - protein, 22 aa, Homo sapiens
CARDSDPYSSSWYSQLGAFDLW

SEQ ID NO: 66965 - protein, 18 aa, Homo sapiens
CAKEWLSGYSYAGPFDYW

SEQ ID NO: 66966 - protein, 13 aa, Homo sapiens
CVRGFLAGPFDCW

SEQ ID NO: 66967 - protein, 14 aa, Homo sapiens
CARGGGPWQDFDYW

SEQ ID NO: 66968 - protein, 27 aa, Homo sapiens
CARDWGNYYDSSGYYSPPYYYYGMDVW

SEQ ID NO: 66969 - protein, 21 aa, Homo sapiens
CATFLEAQFFEWFTSNYLDAW

SEQ ID NO: 66970 - protein, 19 aa, Homo sapiens
CARAAFWSGYNNGWYFDFW

SEQ ID NO: 66971 - protein, 22 aa, Homo sapiens
CAKGIVGYSSSYYVGGVHFDYW

SEQ ID NO: 66972 - protein, 17 aa, Homo sapiens
CARGAVGATGAYYFDYW

SEQ ID NO: 66973 - protein, 17 aa, Homo sapiens
CAKSLKDIVVDPTPDYW

SEQ ID NO: 66974 - protein, 21 aa, Homo sapiens
CARGHPILEWLRGGGNAFDIW

SEQ ID NO: 66975 - protein, 20 aa, Homo sapiens
CASLLSLYCSRNYCYYFDYW

SEQ ID NO: 66976 - protein, 15 aa, Homo sapiens
CARMMGSSSTSYDYW

SEQ ID NO: 66977 - protein, 15 aa, Homo sapiens
CARAHNNGYIYFDHW

SEQ ID NO: 66978 - protein, 13 aa, Homo sapiens
CARMVVHVGLDYW

SEQ ID NO: 66979 - protein, 18 aa, Homo sapiens
CARSITAAGTGGGAFDIW

SEQ ID NO: 66980 - protein, 15 aa, Homo sapiens [sequence omitted]

SEQ ID NO: 66981 - protein, 14 aa, Homo sapiens
CASHFSFSTSFDYW

SEQ ID NO: 66982 - protein, 23 aa, Homo sapiens
CARSLSITGTTMRYYYYYYMDVW

SEQ ID NO: 66983 - protein, 18 aa, Homo sapiens
CARDESGYGPLFRWFDLW

SEQ ID NO: 66984 - protein, 16 aa, Homo sapiens
CRSYGYHYYYYYMDVW

SEQ ID NO: 66985 - protein, 16 aa, Homo sapiens
CARLVGATGVVWFDYW

SEQ ID NO: 66986 - protein, 18 aa, Homo sapiens
CAHSPACSSGWCDYFDYW

SEQ ID NO: 66987 - protein, 18 aa, Homo sapiens
CARLRYGGGTPQTYFDSW

SEQ ID NO: 66988 - protein, 15 aa, Homo sapiens
CTTHTMIVVVTPDYW

SEQ ID NO: 66989 - protein, 18 aa, Homo sapiens
CAKAGYSYGYKKSFFDYW

SEQ ID NO: 66990 - protein, 15 aa, Homo sapiens
CARTYSGSFPTLDYW

SEQ ID NO: 66991 - protein, 23 aa, Homo sapiens
CAKLHVGLGPYYYDSSGYEADYW

SEQ ID NO: 66992 - protein, 13 aa, Homo sapiens
CARGGELLYFDSW

SEQ ID NO: 66993 - protein, 16 aa, Homo sapiens
CAKSVDTAMVGTFDYW

SEQ ID NO: 66994 - protein, 18 aa, Homo sapiens
CAKDFGSSGWYEDGMDVW

SEQ ID NO: 66995 - protein, 18 aa, Homo sapiens
CAREPVIMAAPDRGFDYW

SEQ ID NO: 66996 - protein, 18 aa, Homo sapiens
CASAFDAYSSGWYATDYW

SEQ ID NO: 66997 - protein, 20 aa, Homo sapiens
CAPTWRRALFGVVMNWFDPW

SEQ ID NO: 66998 - protein, 24 aa, Homo sapiens
CAREFYGDFWSGSPGGYYYGMDVW

SEQ ID NO: 66999 - protein, 21 aa, Homo sapiens
CARHRGYNYGTFGRQNWFDLW

SEQ ID NO: 67000 - protein, 21 aa, Homo sapiens
CTRDAITYCGSTTCYGSHDYW

SEQ ID NO: 67001 - protein, 18 aa, Homo sapiens
CASTPHGQWLQPALFEYW

SEQ ID NO: 67002 - protein, 20 aa, Homo sapiens
CARGQWYCSGGNCHDAFDIW

SEQ ID NO: 67003 - protein, 20 aa, Homo sapiens
CARQIADLRIAPYYYYMDVW

SEQ ID NO: 67004 - protein, 14 aa, Homo sapiens
CARELLYDSGFGYW

SEQ ID NO: 67005 - protein, 14 aa, Homo sapiens
CQVWDFTSDHPWVF

SEQ ID NO: 67006 - protein, 30 aa, Homo sapiens
CTTERVATISWDCSGGSCYKNYYYYYMDVW

SEQ ID NO: 67007 - protein, 16 aa, Homo sapiens
CVRSGLSITAHQFDYW

SEQ ID NO: 67008 - protein, 15 aa, Homo sapiens
CARGSGWYEPLIDYW

SEQ ID NO: 67009 - protein, 19 aa, Homo sapiens
CVHRDYDRSGPTGDFFDYW

SEQ ID NO: 67010 - protein, 22 aa, Homo sapiens
CARLYGGQRYCRSGNCHYFDYW

SEQ ID NO: 67011 - protein, 18 aa, Homo sapiens
CARDRVSSRYDYFAFDYW

SEQ ID NO: 67012 - protein, 22 aa, Homo sapiens
CARGDYGFWSGSHRYFYYMDVW

SEQ ID NO: 67013 - protein, 21 aa, Homo sapiens
CVRDLQDYYASGSYYNGFKYW

SEQ ID NO: 67014 - protein, 19 aa, Homo sapiens
CARCEGIFGVLIPDLFDYW

SEQ ID NO: 67015 - protein, 17 aa, Homo sapiens
CARGPQTRSSGWYFDFW

SEQ ID NO: 67016 - protein, 13 aa, Homo sapiens
CLHHYSYPPIYTF

SEQ ID NO: 67017 - protein, 17 aa, Homo sapiens
CATLPEYSSGWYSQDYW

SEQ ID NO: 67018 - protein, 21 aa, Homo sapiens
CAKDTLLGHCRGGICNKIDYW

SEQ ID NO: 67019 - protein, 20 aa, Homo sapiens
CAREVVVGGRYLEDDGFDMW

SEQ ID NO: 67020 - protein, 20 aa, Homo sapiens
CARQGCTSTSCSVDTQFDYW

SEQ ID NO: 67021 - protein, 24 aa, Homo sapiens
CASTFVTYYDYVWGSYHIRPIDYW

SEQ ID NO: 67022 - protein, 15 aa, Homo sapiens
CATSGWTTPMYFDYW

SEQ ID NO: 67023 - protein, 15 aa, Homo sapiens
CARFDNLYSNQADYW

SEQ ID NO: 67024 - protein, 26 aa, Homo sapiens
CARDIKAYYYDSSGYYGYYYYGMDVW

SEQ ID NO: 67025 - protein, 27 aa, Homo sapiens
CARDSSASGEKSYCSGGSCDPSSFDYW

SEQ ID NO: 67026 - protein, 15 aa, Homo sapiens
CASFLSAAAAGFDYW

SEQ ID NO: 67027 - protein, 28 aa, Homo sapiens
CAKDLRVYYDSSGLNPTPYYYYYGMDVW

SEQ ID NO: 67028 - protein, 18 aa, Homo sapiens
CARDLSGSWGVGGPFDPW

SEQ ID NO: 67029 - protein, 16 aa, Homo sapiens
CAKDNSISILGELDYW

SEQ ID NO: 67030 - protein, 17 aa, Homo sapiens
CARGGLNIFEMLTNDYW

SEQ ID NO: 67031 - protein, 15 aa, Homo sapiens
CATASIAARQYFDYW

SEQ ID NO: 67032 - protein, 15 aa, Homo sapiens
CASVYGDYLYDFDYW

SEQ ID NO: 67033 - protein, 17 aa, Homo sapiens
CAKGVDTTMLDDALDFW

SEQ ID NO: 67034 - protein, 20 aa, Homo sapiens
CARGSSYDFWSGYYRHLDYW

SEQ ID NO: 67035 - protein, 26 aa, Homo sapiens
CARDQTLGIHYYDSSGYYSFGWFDPW

SEQ ID NO: 67036 - protein, 17 aa, Homo sapiens
CARSGPGSGYSYFFDYW

SEQ ID NO: 67037 - protein, 20 aa, Homo sapiens
CARKLNSRLRYFDWFTFDYW

SEQ ID NO: 67038 - protein, 21 aa, Homo sapiens
CARPREDCSSTSCYMSWFDPW

SEQ ID NO: 67039 - protein, 17 aa, Homo sapiens
CARDGEVGATLYYFDYW

SEQ ID NO: 67040 - protein, 28 aa, Homo sapiens
CARDSQPNCSSTSCPWSLLTSYYYMDVW

SEQ ID NO: 67041 - protein, 13 aa, Homo sapiens
CARDSADGYFDQW

SEQ ID NO: 67042 - protein, 23 aa, Homo sapiens
CARATPNDTIFGVVIIPGAFDIW

SEQ ID NO: 67043 - protein, 16 aa, Homo sapiens
CAGGSGTYRQSPFDFW

SEQ ID NO: 67044 - protein, 18 aa, Homo sapiens
CTKHLIGTSSSYDALDNW

SEQ ID NO: 67045 - protein, 23 aa, Homo sapiens
CAKDMAGYCGITNCFGPWGNDYW

SEQ ID NO: 67046 - protein, 20 aa, Homo sapiens
CAREIETDSSGYYDNWFDPW

SEQ ID NO: 67047 - protein, 22 aa, Homo sapiens
CARGYYDYDTFGYETYYGMDVW

SEQ ID NO: 67048 - protein, 20 aa, Homo sapiens
CARSFLTYYGDYVGDAFDVW

SEQ ID NO: 67049 - protein, 15 aa, Homo sapiens
CAKVWGASWFAFDMW

SEQ ID NO: 67050 - protein, 25 aa, Homo sapiens
CARSGKRDVVIGPAAHNTKTWFDPW

SEQ ID NO: 67051 - protein, 16 aa, Homo sapiens
CAHRLMYSTSDAFDYW

SEQ ID NO: 67052 - protein, 16 aa, Homo sapiens
CAAGSQWLSSSDFDFW

SEQ ID NO: 67053 - protein, 19 aa, Homo sapiens
CARRGQQMYYFKTGAFDIW

SEQ ID NO: 67054 - protein, 18 aa, Homo sapiens
CARQRYSYGYILRSFDYW

SEQ ID NO: 67055 - protein, 20 aa, Homo sapiens
CARDSSLGLAMIRGLYFDYW

SEQ ID NO: 67056 - protein, 18 aa, Homo sapiens
CARQGTLRFSGGSHFDYW

SEQ ID NO: 67057 - protein, 21 aa, Homo sapiens
CARDMYSSSPNFYYYYGMDVW

SEQ ID NO: 67058 - protein, 21 aa, Homo sapiens
CAREGYDSSGYYRDAEYFQHW

SEQ ID NO: 67059 - protein, 19 aa, Homo sapiens
CASEHFWSGHYPPRYFDYW

SEQ ID NO: 67060 - protein, 18 aa, Homo sapiens
CARTKIRGVIITDAFDIW

SEQ ID NO: 67061 - protein, 19 aa, Homo sapiens
CAKEFDATPFVTLYYYDSW

SEQ ID NO: 67062 - protein, 24 aa, Homo sapiens
CARRYYDFWSGYDPDYYYYGMDVW

SEQ ID NO: 67063 - protein, 21 aa, Homo sapiens
CAHSGPDTSSWGGWGDDFDYW

SEQ ID NO: 67064 - protein, 15 aa, Homo sapiens
CARYEGDSEGAFDYW

SEQ ID NO: 67065 - protein, 13 aa, Homo sapiens
CARDQRETQFDLW

SEQ ID NO: 67066 - protein, 14 aa, Homo sapiens
CASDKRGGTGSDYW

SEQ ID NO: 67067 - protein, 17 aa, Homo sapiens
CARARGTYSVKEGFDYW

SEQ ID NO: 67068 - protein, 18 aa, Homo sapiens
CATGGGHDSRGIYYFDNW

SEQ ID NO: 67069 - protein, 17 aa, Homo sapiens
CAKDIGDSGWYGPFHYW

SEQ ID NO: 67070 - protein, 18 aa, Homo sapiens
CARGPLRLLPFGDLFDYW

SEQ ID NO: 67071 - protein, 19 aa, Homo sapiens
CAKDLRYLGPYYYYGMDVW

SEQ ID NO: 67072 - protein, 17 aa, Homo sapiens
CARRGSAVVTTPGFDYW

SEQ ID NO: 67073 - protein, 17 aa, Homo sapiens
CVSQGSGNYYSDALDVW

SEQ ID NO: 67074 - protein, 24 aa, Homo sapiens
CARGRSKITMIVVVTGVYPVFDYW

SEQ ID NO: 67075 - protein, 15 aa, Homo sapiens
CARIVIGFEYYMDVW

SEQ ID NO: 67076 - protein, 17 aa, Homo sapiens
CAREGGVVAAAYYFDYW

SEQ ID NO: 67077 - protein, 12 aa, Homo sapiens
CARGVGLDFDDW

SEQ ID NO: 67078 - protein, 16 aa, Homo sapiens
CVRTSSTTRNHPFFYW

SEQ ID NO: 67079 - protein, 22 aa, Homo sapiens
CARDSAYSGYDDYYYYYGMDVW

SEQ ID NO: 67080 - protein, 25 aa, Homo sapiens
CAKDLAVLKKTAGVTPPAMITFDVW

SEQ ID NO: 67081 - protein, 23 aa, Homo sapiens
CARHLAVFNPTRGVIITSWFDPW

SEQ ID NO: 67082 - protein, 18 aa, Homo sapiens
CSRGKLGAFGRAGYLDLW

SEQ ID NO: 67083 - protein, 17 aa, Homo sapiens
CATDQGVVTYYYYMDVW

SEQ ID NO: 67084 - protein, 21 aa, Homo sapiens
CARDQLVGVIKYYYYYGMDVW

SEQ ID NO: 67085 - protein, 14 aa, Homo sapiens
CARESGSNWFFDVW

SEQ ID NO: 67086 - protein, 18 aa, Homo sapiens
CDSSRCYLSSPSRPFDYW

SEQ ID NO: 67087 - protein, 23 aa, Homo sapiens
CARGITMVRGVIPRNYYYGMDVW

SEQ ID NO: 67088 - protein, 15 aa, Homo sapiens
CAKVQHSHSGWADYW

SEQ ID NO: 67089 - protein, 18 aa, Homo sapiens
CAKNSYGYGWGSYYFDYW

SEQ ID NO: 67090 - protein, 19 aa, Homo sapiens
CVRGEILFPGATYPVRDYW

SEQ ID NO: 67091 - protein, 23 aa, Homo sapiens
CTKSRAFSYGPESPHYYYGMDVW

SEQ ID NO: 67092 - protein, 19 aa, Homo sapiens
CASTASIAVAGSLWAFDIW

SEQ ID NO: 67093 - protein, 17 aa, Homo sapiens
CVKGSSSWYLGEPLDYW

SEQ ID NO: 67094 - protein, 16 aa, Homo sapiens
CARLRSTYYYDASDVW

SEQ ID NO: 67095 - protein, 14 aa, Homo sapiens
CARDYHGDRLFDPW

SEQ ID NO: 67096 - protein, 24 aa, Homo sapiens
CARCLRVASDIGDLWSLNNAFDIW

SEQ ID NO: 67097 - protein, 17 aa, Homo sapiens
CVRGLYNSGSVDAFDIW

SEQ ID NO: 67098 - protein, 28 aa, Homo sapiens
CARGLVVPAALTRGEGVAAAVLDAFDIW

SEQ ID NO: 67099 - protein, 25 aa, Homo sapiens
CARGGWGKGGYLPHPDYYYYGMDVW

SEQ ID NO: 67100 - protein, 17 aa, Homo sapiens
CARDIGVGGTLGVIDYW

SEQ ID NO: 67101 - protein, 17 aa, Homo sapiens
CAKRLSASSGWYPFDYW

SEQ ID NO: 67102 - protein, 22 aa, Homo sapiens
CARCKKDYYDGTSYFEYYFDYW

SEQ ID NO: 67103 - protein, 14 aa, Homo sapiens
CARGGLRSDYFDFW

SEQ ID NO: 67104 - protein, 22 aa, Homo sapiens
CARVSWLGIAAAGTLGNYFDYW

SEQ ID NO: 67105 - protein, 24 aa, Homo sapiens
CVRCHRTFFYDFLNSYYYYYMDVW

SEQ ID NO: 67106 - protein, 23 aa, Homo sapiens
CAKDIGPYYDFWSGNSSGYFDLW

SEQ ID NO: 67107 - protein, 14 aa, Homo sapiens
CATNWGLDDAFDFW

SEQ ID NO: 67108 - protein, 19 aa, Homo sapiens
CARRSSGFGESYYDAFDIW

SEQ ID NO: 67109 - protein, 17 aa, Homo sapiens
CATTSTAWTRIAPFDYW

SEQ ID NO: 67110 - protein, 20 aa, Homo sapiens
CAKIFGSSSGWYPTSYVDYW

SEQ ID NO: 67111 - protein, 16 aa, Homo sapiens
CAKCHSINCFTGPDYW

SEQ ID NO: 67112 - protein, 20 aa, Homo sapiens
CARDPPPEIPVPGPDKNDYW

SEQ ID NO: 67113 - protein, 39 aa, Homo sapiens
CARLRWDVVLGEPVTSFIGLFPTVTSRLRNSYYYYMDVW

SEQ ID NO: 67114 - protein, 19 aa, Homo sapiens
CAKGSSGYPPYYYNGMDVW

SEQ ID NO: 67115 - protein, 22 aa, Homo sapiens
CARDVYEGYMSGPPRAYYFDYW

SEQ ID NO: 67116 - protein, 16 aa, Homo sapiens
CARGEYYYDSGGLDYW

SEQ ID NO: 67117 - protein, 15 aa, Homo sapiens
CARSKGYFLVDFDSW

SEQ ID NO: 67118 - protein, 19 aa, Homo sapiens
CAKGGTYYVSGSDHYFDSW

SEQ ID NO: 67119 - protein, 21 aa, Homo sapiens
CARPILTTASDWFYYYYMDVW

SEQ ID NO: 67120 - protein, 16 aa, Homo sapiens
CARERDTVVLTGIDYW

SEQ ID NO: 67121 - protein, 20 aa, Homo sapiens
CARHPSHCSSTSCYRPFGYW

SEQ ID NO: 67122 - protein, 20 aa, Homo sapiens
CARHVTVVPAGETDWYFDLW

SEQ ID NO: 67123 - protein, 18 aa, Homo sapiens
CARFGRSSITYYYGMDVW

SEQ ID NO: 67124 - protein, 23 aa, Homo sapiens
CARCTTYYDFWGPTGYYYYMDVW

SEQ ID NO: 67125 - protein, 15 aa, Homo sapiens
CARGVLRYSEVPDYW

SEQ ID NO: 67126 - protein, 21 aa, Homo sapiens
CARDLRVGTGEVDYYYGMDVW

SEQ ID NO: 67127 - protein, 16 aa, Homo sapiens
CARARRGYSGYRFDLW

SEQ ID NO: 67128 - protein, 23 aa, Homo sapiens
CAREPFRGYDILTGSYYYGMDVW

SEQ ID NO: 67129 - protein, 18 aa, Homo sapiens
CARILDDFWSGRGWFDPW

SEQ ID NO: 67130 - protein, 20 aa, Homo sapiens
CARQNSDGGYWVPHDAFDIW

SEQ ID NO: 67131 - protein, 18 aa, Homo sapiens
CGRDYTTVEPSMYYMDVW

SEQ ID NO: 67132 - protein, 22 aa, Homo sapiens
CTRDLWQGGHCSTSNCPRHDYW

SEQ ID NO: 67133 - protein, 22 aa, Homo sapiens
CARFTGPRLTGYQYYYYGMDVW

SEQ ID NO: 67134 - protein, 15 aa, Homo sapiens
CAKGHPSGWDLIDYW

SEQ ID NO: 67135 - protein, 13 aa, Homo sapiens
CASLSPDRSLDYW

SEQ ID NO: 67136 - protein, 13 aa, Homo sapiens
CARKKSANWFDPW

SEQ ID NO: 67137 - protein, 13 aa, Homo sapiens
CATSGRAAFFDHW

SEQ ID NO: 67138 - protein, 22 aa, Homo sapiens
CAKRGYCSGGRCHSGLPYFDYW

SEQ ID NO: 67139 - protein, 21 aa, Homo sapiens
CARGGVTIFGVVIYQGYMDVW

SEQ ID NO: 67140 - protein, 23 aa, Homo sapiens
CARGPRITIFGVVIMAGRWFDPW

SEQ ID NO: 67141 - protein, 16 aa, Homo sapiens
CARTSCLGGHCPFDFW

SEQ ID NO: 67142 - protein, 24 aa, Homo sapiens
CAKDAGIPPAAPNFYYYYYYMDVW

SEQ ID NO: 67143 - protein, 19 aa, Homo sapiens
CATGEYSSSWYQSRVFDYW

SEQ ID NO: 67144 - protein, 17 aa, Homo sapiens
CAKVTVTYSGSHYFDYW

SEQ ID NO: 67145 - protein, 20 aa, Homo sapiens
CAIQYSSGWYFSHYYYMDVW

SEQ ID NO: 67146 - protein, 20 aa, Homo sapiens
CAREYRYCSSTSCYTEFDYW

SEQ ID NO: 67147 - protein, 20 aa, Homo sapiens
CAHSSNDFWTGYHGGWFDPW

SEQ ID NO: 67148 - protein, 23 aa, Homo sapiens
CARKVERIATKPSSYYYYYMDVW

SEQ ID NO: 67149 - protein, 15 aa, Homo sapiens
CVRMRSRTNDAFDMW

SEQ ID NO: 67150 - protein, 16 aa, Homo sapiens
CASSRGPTGDGLWDYW

SEQ ID NO: 67151 - protein, 17 aa, Homo sapiens
CASLPSGYDPLNAFDIW

SEQ ID NO: 67152 - protein, 13 aa, Homo sapiens
CARDIRASYLDSW

SEQ ID NO: 67153 - protein, 22 aa, Homo sapiens
CARDKELRYFDWSYYYYGMDVW

SEQ ID NO: 67154 - protein, 19 aa, Homo sapiens
CAKLADYDILTGYLSFDYW

SEQ ID NO: 67155 - protein, 15 aa, Homo sapiens
CARDRRIGVRAFDIW

SEQ ID NO: 67156 - protein, 19 aa, Homo sapiens
CARENTIFGVVRVPYFDYW

SEQ ID NO: 67157 - protein, 26 aa, Homo sapiens
CAKDALWFGELLKGGIMMGPYYFDYW

SEQ ID NO: 67158 - protein, 19 aa, Homo sapiens
CAKERRGVQMVVGGGIDYW

SEQ ID NO: 67159 - protein, 24 aa, Homo sapiens
CAKGGSLWYVYYDFWSGYWNFDYW

SEQ ID NO: 67160 - protein, 15 aa, Homo sapiens
CARTAVAGSVAMDVW

SEQ ID NO: 67161 - protein, 15 aa, Homo sapiens
CARDPNPVYGDYDYW

SEQ ID NO: 67162 - protein, 19 aa, Homo sapiens
CAKDIGYGQYQLLDYCDFW

SEQ ID NO: 67163 - protein, 22 aa, Homo sapiens
CAKDVMVVAATGYYYYYGMDVW

SEQ ID NO: 67164 - protein, 23 aa, Homo sapiens
CARDTAPEDLWFGELLLPYFDYW

SEQ ID NO: 67165 - protein, 21 aa, Homo sapiens
CAKHAFLAAAGTYYYYGMDVW

SEQ ID NO: 67166 - protein, 17 aa, Homo sapiens
CARGIWDSSSFEYFQHW

SEQ ID NO: 67167 - protein, 21 aa, Homo sapiens
CATDTDYYDSSGYYRRHFDYW

SEQ ID NO: 67168 - protein, 17 aa, Homo sapiens
CAQGAGLGSGWYGFDYW

SEQ ID NO: 67169 - protein, 14 aa, Homo sapiens
CAPRDDILTGYFDW

SEQ ID NO: 67170 - protein, 26 aa, Homo sapiens
CARDPVYCSGGSCYPYYYYYYGMDVW

SEQ ID NO: 67171 - protein, 23 aa, Homo sapiens
CARERTFTIFGVAVDHGYYFDYW

SEQ ID NO: 67172 - protein, 23 aa, Homo sapiens
CAKDADNSLLWFGELFIPAFDIW

SEQ ID NO: 67173 - protein, 18 aa, Homo sapiens
CARTLRQWLAFTNWFDPW

SEQ ID NO: 67174 - protein, 23 aa, Homo sapiens
CARVFGEPWIQLWLAYYYGMDVW

SEQ ID NO: 67175 - protein, 19 aa, Homo sapiens
CARDFVDYGGPEVWYFDLW

SEQ ID NO: 67176 - protein, 13 aa, Homo sapiens
CARSRLGLWPDYW

SEQ ID NO: 67177 - protein, 21 aa, Homo sapiens
CASPLVRFLEWSGHYWYFDLW

SEQ ID NO: 67178 - protein, 20 aa, Homo sapiens
CARLPMSDFWSGPRDPFDYW

SEQ ID NO: 67179 - protein, 21 aa, Homo sapiens
CAGHHVDTASVDHYYYYMDVW

SEQ ID NO: 67180 - protein, 20 aa, Homo sapiens
CATDHSSPFSFYYNYGMDVW

SEQ ID NO: 67181 - protein, 22 aa, Homo sapiens
CARRVLYCSSTSCYTLGWFDPW

SEQ ID NO: 67182 - protein, 18 aa, Homo sapiens
CARDLGPFGSGWDDSDYW

SEQ ID NO: 67183 - protein, 24 aa, Homo sapiens
CAKDQEDGYSYGRLYYYYYGMDVW

SEQ ID NO: 67184 - protein, 18 aa, Homo sapiens
CARNDAPFSGSYSPIDYW

SEQ ID NO: 67185 - protein, 16 aa, Homo sapiens
CATTASSSGQNPTDYW

SEQ ID NO: 67186 - protein, 13 aa, Homo sapiens
CAVKMATGNFDYW

SEQ ID NO: 67187 - protein, 16 aa, Homo sapiens
CAKQWGFSNSYYFDYW

SEQ ID NO: 67188 - protein, 18 aa, Homo sapiens
CAGGGVAGTRGYYYMDVW

SEQ ID NO: 67189 - protein, 15 aa, Homo sapiens
CTRVRDLNYYYMDVW

SEQ ID NO: 67190 - protein, 17 aa, Homo sapiens
CAREHPGYSSGQFFDYW

SEQ ID NO: 67191 - protein, 19 aa, Homo sapiens
CAKDASYSISRLPYYFHYW

SEQ ID NO: 67192 - protein, 25 aa, Homo sapiens
CAGDVETPLGSRRGSWKGYFYMDVW

SEQ ID NO: 67193 - protein, 15 aa, Homo sapiens
CAHYNSGTYLPFDYW

SEQ ID NO: 67194 - protein, 21 aa, Homo sapiens
CARRESSSGYLVYLVGAFDIW

SEQ ID NO: 67195 - protein, 19 aa, Homo sapiens
CARHGSHFDTSGHFPFDYW

SEQ ID NO: 67196 - protein, 17 aa, Homo sapiens
CVRDEKRGLSNDCFDVW

SEQ ID NO: 67197 - protein, 16 aa, Homo sapiens
CARRNWNLNSYYFDYW

SEQ ID NO: 67198 - protein, 12 aa, Homo sapiens
CANLAGGYFLSW

SEQ ID NO: 67199 - protein, 20 aa, Homo sapiens
CVKDSITSPYSSSPEGFDYW

SEQ ID NO: 67200 - protein, 26 aa, Homo sapiens
CARDATYCSGGSCYRLNYYYYYMDVW

SEQ ID NO: 67201 - protein, 19 aa, Homo sapiens
CARGGTTVIPIFYNWFDPW

SEQ ID NO: 67202 - protein, 25 aa, Homo sapiens
CASSTPARYCSGGSCYSVVGWFDPW

SEQ ID NO: 67203 - protein, 19 aa, Homo sapiens
CAGAEEWLLLNNSHELDYW

SEQ ID NO: 67204 - protein, 12 aa, Homo sapiens
CSFGNAWAFDYW

SEQ ID NO: 67205 - protein, 19 aa, Homo sapiens
CANDYYDSSDYDYIKSDYW

SEQ ID NO: 67206 - protein, 15 aa, Homo sapiens
CAHGEGRMFMAFDIW

SEQ ID NO: 67207 - protein, 22 aa, Homo sapiens
CARDPRWEVRGVNYYYYGMDVW

SEQ ID NO: 67208 - protein, 19 aa, Homo sapiens
CARESPTRTGYPRGWFDPW

SEQ ID NO: 67209 - protein, 22 aa, Homo sapiens
CARDSRTVTTTVAYYYYGMDVW

SEQ ID NO: 67210 - protein, 24 aa, Homo sapiens
CARDSVSSSGTQTEYYYYYGMDVW

SEQ ID NO: 67211 - protein, 17 aa, Homo sapiens
CARVPPFWSGYQRPDYW

SEQ ID NO: 67212 - protein, 20 aa, Homo sapiens
CARSQITIAARRTLHFFDFW

SEQ ID NO: 67213 - protein, 19 aa, Homo sapiens
CARDPRVTTVTPVFGFDYW

SEQ ID NO: 67214 - protein, 14 aa, Homo sapiens
CTLGLDYYYYMDVW

SEQ ID NO: 67215 - protein, 17 aa, Homo sapiens
CAKDRGPSNYHDAFAIW

SEQ ID NO: 67216 - protein, 11 aa, Homo sapiens
CQQFHNLLYTF

SEQ ID NO: 67217 - protein, 15 aa, Homo sapiens
CARNGADYLFPSDYW

SEQ ID NO: 67218 - protein, 20 aa, Homo sapiens
CAKAPDCSGGSCYLVAFDIW

SEQ ID NO: 67219 - protein, 23 aa, Homo sapiens
CARQEAGYCSSTSCYRSPGFDPW

SEQ ID NO: 67220 - protein, 16 aa, Homo sapiens
CATDREQLVRGLFDYW

SEQ ID NO: 67221 - protein, 19 aa, Homo sapiens
CAMGVYQLLSSYYYGMDVW

SEQ ID NO: 67222 - protein, 15 aa, Homo sapiens
CARRFVDTAMELDYW

SEQ ID NO: 67223 - protein, 21 aa, Homo sapiens
CARGPPNSSGYYSAAEYFQHW

SEQ ID NO: 67224 - protein, 16 aa, Homo sapiens
CARVVGDGYNEEGDYW

SEQ ID NO: 67225 - protein, 18 aa, Homo sapiens
CAKDMDFGGNHWDGQDYW

SEQ ID NO: 67226 - protein, 17 aa, Homo sapiens
CARVTGLYNREYYFDYW

SEQ ID NO: 67227 - protein, 21 aa, Homo sapiens
CARDGVLVVPAVIQTWALDIW

SEQ ID NO: 67228 - protein, 18 aa, Homo sapiens
CAKDWNYDSSAPDAIDIW

SEQ ID NO: 67229 - protein, 18 aa, Homo sapiens
CAKVISIAARRAWAFDIW

SEQ ID NO: 67230 - protein, 18 aa, Homo sapiens
CARNLKLEWPSQDTFDIW

SEQ ID NO: 67231 - protein, 28 aa, Homo sapiens
CARDLGLRGYSYGLNHRSYYYYYGMDVW

SEQ ID NO: 67232 - protein, 16 aa, Homo sapiens
CARVTTPRNTDSFDVW

SEQ ID NO: 67233 - protein, 21 aa, Homo sapiens
CAHRNYDFWSGYYTGYAFDIW

SEQ ID NO: 67234 - protein, 23 aa, Homo sapiens
CAHRRGVTWLGQLLYSGSWFDPW

SEQ ID NO: 67235 - protein, 26 aa, Homo sapiens
CARIRLGVGGSGSYPPSYYYYGMDVW

SEQ ID NO: 67236 - protein, 16 aa, Homo sapiens
CVKDKTTVTRGPFDHW

SEQ ID NO: 67237 - protein, 18 aa, Homo sapiens
CARDSSYGDYTVGWFDPW

SEQ ID NO: 67238 - protein, 14 aa, Homo sapiens
CQLWDSSNDHRVVF

SEQ ID NO: 67239 - protein, 14 aa, Homo sapiens
CARDSPRGDGLDYW

SEQ ID NO: 67240 - protein, 13 aa, Homo sapiens
CQEYDTLPLHVTF

SEQ ID NO: 67241 - protein, 20 aa, Homo sapiens
CARGVGSSGWTYYYYGMDVW

SEQ ID NO: 67242 - protein, 16 aa, Homo sapiens
CARGEAVAGSVRFDPW

SEQ ID NO: 67243 - protein, 16 aa, Homo sapiens
CARDDYGAHLTWFDPW

SEQ ID NO: 67244 - protein, 16 aa, Homo sapiens
CARLTRYQLLRWFDPW

SEQ ID NO: 67245 - protein, 22 aa, Homo sapiens
CARDGIGSLRFLEWYNPYFDYW

SEQ ID NO: 67246 - protein, 19 aa, Homo sapiens
CTTVFPIYFDSRGDGFDIW

SEQ ID NO: 67247 - protein, 16 aa, Homo sapiens
CATERFVVRGLLTDYW

SEQ ID NO: 67248 - protein, 19 aa, Homo sapiens
CAREGSFDSSGYSDAFDIW

SEQ ID NO: 67249 - protein, 17 aa, Homo sapiens
CAQSRERDGHFGTFDFW

SEQ ID NO: 67250 - protein, 15 aa, Homo sapiens
CAGDASGYEGIWDYW

SEQ ID NO: 67251 - protein, 17 aa, Homo sapiens
CAHSVRFTTNHHYFDAW

SEQ ID NO: 67252 - protein, 25 aa, Homo sapiens
CARQAPPGYDILTGYYSGPYYFDYW

SEQ ID NO: 67253 - protein, 20 aa, Homo sapiens
CARARGSYFALDYYYYMDVW

SEQ ID NO: 67254 - protein, 16 aa, Homo sapiens
CARAWGEARTQTFDYW

SEQ ID NO: 67255 - protein, 12 aa, Homo sapiens
CTKVDGAVFEYW

SEQ ID NO: 67256 - protein, 16 aa, Homo sapiens
CARHNYGDHSRSADYW

SEQ ID NO: 67257 - protein, 16 aa, Homo sapiens
CAKDGGGRNPSYFDFW

SEQ ID NO: 67258 - protein, 17 aa, Homo sapiens
CAKSDGGLGISDCFDPW

SEQ ID NO: 67259 - protein, 16 aa, Homo sapiens
CARLFGPIGEWYFDLW

SEQ ID NO: 67260 - protein, 22 aa, Homo sapiens
CARAPPRALRLLEWPSYYFDYW

SEQ ID NO: 67261 - protein, 23 aa, Homo sapiens
CTRDQEDVLRFLEWPANYYMDVW

SEQ ID NO: 67262 - protein, 17 aa, Homo sapiens
CAKDEHNFWSGPIGDYW

SEQ ID NO: 67263 - protein, 22 aa, Homo sapiens
CARQTVWFGELQSYYYYGMDVW

SEQ ID NO: 67264 - protein, 23 aa, Homo sapiens
CASQDYYYDSSDYYITPGPFDSW

SEQ ID NO: 67265 - protein, 14 aa, Homo sapiens
CAAWDDSPNAHYAF

SEQ ID NO: 67266 - protein, 16 aa, Homo sapiens
CARASQWLVYTHLDYW

SEQ ID NO: 67267 - protein, 12 aa, Homo sapiens
CQQWGGSPQFIF

SEQ ID NO: 67268 - protein, 17 aa, Homo sapiens
CAYSSGWYSQDRSIDYW

SEQ ID NO: 67269 - protein, 16 aa, Homo sapiens
CATDLMIYTPALNDYW

SEQ ID NO: 67270 - protein, 17 aa, Homo sapiens
CANLRFIAALVPAFDYW

SEQ ID NO: 67271 - protein, 22 aa, Homo sapiens
CARDQRDFWSGYYIPYDAFDIW

SEQ ID NO: 67272 - protein, 19 aa, Homo sapiens
CAREVHIVVVIDQYYMDVW

SEQ ID NO: 67273 - protein, 15 aa, Homo sapiens
CARDFITGRGGFDYW

SEQ ID NO: 67274 - protein, 25 aa, Homo sapiens
CARQEMARIVVVIAPTHTPYYFDYW

SEQ ID NO: 67275 - protein, 17 aa, Homo sapiens
CAKSNGGSGLYTAMDYW

SEQ ID NO: 67276 - protein, 18 aa, Homo sapiens
CARERITNFGLKDAFDMW

SEQ ID NO: 67277 - protein, 14 aa, Homo sapiens
CARGSPTVTTWDYW

SEQ ID NO: 67278 - protein, 21 aa, Homo sapiens
CAKEDRTTVVSYYFYYGMDVW

SEQ ID NO: 67279 - protein, 20 aa, Homo sapiens
CARGLAGITMVRGVSWFDPW

SEQ ID NO: 67280 - protein, 22 aa, Homo sapiens
CARGSQPNTFGGVIVIFWFDPW

SEQ ID NO: 67281 - protein, 15 aa, Homo sapiens
CARIKGSSSLGLDYW

SEQ ID NO: 67282 - protein, 19 aa, Homo sapiens
CSHTGYDSRILIPVYFDYW

SEQ ID NO: 67283 - protein, 21 aa, Homo sapiens
CARDVAAAGTGEYYYYGMDVW

SEQ ID NO: 67284 - protein, 14 aa, Homo sapiens
CAHRGNPLHWFDPW

SEQ ID NO: 67285 - protein, 21 aa, Homo sapiens
CTRAATDSSGYFDYPNAFDIW

SEQ ID NO: 67286 - protein, 13 aa, Homo sapiens
CLQYNNYPPGLTF

SEQ ID NO: 67287 - protein, 23 aa, Homo sapiens
CARDLIAAGSRLRSWPGDYSDYW

SEQ ID NO: 67288 - protein, 16 aa, Homo sapiens
CASFEYTTSSGAFDIW

SEQ ID NO: 67289 - protein, 15 aa, Homo sapiens
CARDKAYGDNWFDLW

SEQ ID NO: 67290 - protein, 19 aa, Homo sapiens
CARESRGLGATKNWYFDLW

SEQ ID NO: 67291 - protein, 14 aa, Homo sapiens
CARTTIVGPTSDYW

SEQ ID NO: 67292 - protein, 17 aa, Homo sapiens
CARESSRSIPVAGIDYW

SEQ ID NO: 67293 - protein, 19 aa, Homo sapiens
CARAGGEDFWSSYNYLDYW

SEQ ID NO: 67294 - protein, 13 aa, Homo sapiens
CAKMMYDSVFDYW

SEQ ID NO: 67295 - protein, 14 aa, Homo sapiens
CARDSLVRSYFDYW

SEQ ID NO: 67296 - protein, 24 aa, Homo sapiens
CAHRRQIVLMQAPSSKSRDGFDMW

SEQ ID NO: 67297 - protein, 15 aa, Homo sapiens
CQRYDDLPRPSPLTF

SEQ ID NO: 67298 - protein, 20 aa, Homo sapiens
CARERIAVAGKDYYYGMDVW

SEQ ID NO: 67299 - protein, 12 aa, Homo sapiens
CARDLFYSIDYW

SEQ ID NO: 67300 - protein, 20 aa, Homo sapiens
CAREAGATQVRYYYYGMDVW

SEQ ID NO: 67301 - protein, 17 aa, Homo sapiens
CASNPYCGGDCYTPDYW

SEQ ID NO: 67302 - protein, 17 aa, Homo sapiens
CARGPPNLRFKYYFDYW

SEQ ID NO: 67303 - protein, 22 aa, Homo sapiens
CAKVSAPTYYDFWSGPDAFDIW

SEQ ID NO: 67304 - protein, 16 aa, Homo sapiens
CARVRDYGPTWNFDYW

SEQ ID NO: 67305 - protein, 22 aa, Homo sapiens
CANGGPHTIFGVVITDDAFDIW

SEQ ID NO: 67306 - protein, 17 aa, Homo sapiens
CAKSGGDYGDYWAGDYW

SEQ ID NO: 67307 - protein, 18 aa, Homo sapiens
CARHGHCSSISCYSFDSW

SEQ ID NO: 67308 - protein, 18 aa, Homo sapiens
CARRPRATQVVGDQFDYW

SEQ ID NO: 67309 - protein, 22 aa, Homo sapiens
CVRTALGFYDSSDMRDDAFDIW

SEQ ID NO: 67310 - protein, 24 aa, Homo sapiens
CARVPGITMIVVVSRNYYYGMDVW

SEQ ID NO: 67311 - protein, 19 aa, Homo sapiens
CARLKGSREFWSTRYFDFW

SEQ ID NO: 67312 - protein, 19 aa, Homo sapiens
CAKGHSSGWYDRWWGLDYW

SEQ ID NO: 67313 - protein, 21 aa, Homo sapiens
CARGVRRITMIVALNYYFDYW

SEQ ID NO: 67314 - protein, 17 aa, Homo sapiens
CASSQRIQLWPGYFDYW

SEQ ID NO: 67315 - protein, 15 aa, Homo sapiens
CTRDWGYYIPYFDLW

SEQ ID NO: 67316 - protein, 21 aa, Homo sapiens
CARDPRITIFGVGYYYGMDVW

SEQ ID NO: 67317 - protein, 15 aa, Homo sapiens
CASFSPRVYDAFDIW

SEQ ID NO: 67318 - protein, 14 aa, Homo sapiens
CARGFGGLRSFDHW

SEQ ID NO: 67319 - protein, 14 aa, Homo sapiens
CTRERIQLWFLDYW

SEQ ID NO: 67320 - protein, 16 aa, Homo sapiens
CAKAQRALTSGGFDYW

SEQ ID NO: 67321 - protein, 17 aa, Homo sapiens
CATAPARVFPTPWFDPW

SEQ ID NO: 67322 - protein, 18 aa, Homo sapiens
CARDADPVKDTARAFDSW

SEQ ID NO: 67323 - protein, 18 aa, Homo sapiens
CARQEGNWYGGAYYFDYW

SEQ ID NO: 67324 - protein, 23 aa, Homo sapiens
CAKGYYDSAGYQLPFYYYAMDVW

SEQ ID NO: 67325 - protein, 20 aa, Homo sapiens
CAKDLAYDTSGYYHPFIDYW

SEQ ID NO: 67326 - protein, 17 aa, Homo sapiens
CAKARIAVAVGLDFDYW

SEQ ID NO: 67327 - protein, 17 aa, Homo sapiens
CAREGSAVAGPSGFDYW

SEQ ID NO: 67328 - protein, 21 aa, Homo sapiens
CAREMGVSLGAVAGDDSCDIW

SEQ ID NO: 67329 - protein, 24 aa, Homo sapiens
CARLGYHHSSGGPLPYYYYSMDVW

SEQ ID NO: 67330 - protein, 25 aa, Homo sapiens
CATDPVGHYGSGDYNKRPARAFDTW

SEQ ID NO: 67331 - protein, 21 aa, Homo sapiens
CARAFSSMGLNYYGYYYMDIW

SEQ ID NO: 67332 - protein, 16 aa, Homo sapiens
CARGDGSSRYRWFDPW

SEQ ID NO: 67333 - protein, 21 aa, Homo sapiens
CARSPYYDFWSGYPMIPFDYW

SEQ ID NO: 67334 - protein, 20 aa, Homo sapiens
CARDVLWTYDSSAVNAFDIW

SEQ ID NO: 67335 - protein, 17 aa, Homo sapiens
CAQMIWRGQLGAFFDLW

SEQ ID NO: 67336 - protein, 14 aa, Homo sapiens
CARTSSVLWAFDIW

SEQ ID NO: 67337 - protein, 17 aa, Homo sapiens
CATRKGETNRGPFFDYW

SEQ ID NO: 67338 - protein, 26 aa, Homo sapiens
CARIIPSTIFGVVIPEYYYYYYMDVW

SEQ ID NO: 67339 - protein, 14 aa, Homo sapiens
CARGVLASYSFDYW

SEQ ID NO: 67340 - protein, 18 aa, Homo sapiens
CVKDRLWGSTSYDAFDTW

SEQ ID NO: 67341 - protein, 22 aa, Homo sapiens
CAHSSRLWVVPAAIPVYAFDIW

SEQ ID NO: 67342 - protein, 17 aa, Homo sapiens
CARAPVGWSNRRIFDYW

SEQ ID NO: 67343 - protein, 15 aa, Homo sapiens
CARGYSSGWFHFDYW

SEQ ID NO: 67344 - protein, 17 aa, Homo sapiens
CAKAVRGGFNLDAFDIW

SEQ ID NO: 67345 - protein, 16 aa, Homo sapiens
CAKDRGRYAYNWFDPW

SEQ ID NO: 67346 - protein, 22 aa, Homo sapiens
CAKVPRYCSRSSCYTDYWFDPW

SEQ ID NO: 67347 - protein, 14 aa, Homo sapiens
CTAELAAAGTFDYW

SEQ ID NO: 67348 - protein, 18 aa, Homo sapiens
CARWAGQHSDYTPLFDFW

SEQ ID NO: 67349 - protein, 17 aa, Homo sapiens
CASSTYIGAGTGWFDPW

SEQ ID NO: 67350 - protein, 21 aa, Homo sapiens
CAKSIGIILVPGGTPDPFDIW

SEQ ID NO: 67351 - protein, 20 aa, Homo sapiens
CARHLSMIVDGYPQDWFDPW

SEQ ID NO: 67352 - protein, 19 aa, Homo sapiens
CARVMGSSVWYGPSCFDYW

SEQ ID NO: 67353 - protein, 18 aa, Homo sapiens
CAKGLGHPGGYYYGMDVW

SEQ ID NO: 67354 - protein, 18 aa, Homo sapiens
CAKGRGTVGATHDDFAVW

SEQ ID NO: 67355 - protein, 21 aa, Homo sapiens
CVRFRRGDFWGGESGDYFDPW

SEQ ID NO: 67356 - protein, 22 aa, Homo sapiens
CATDQLIRYSNPDYYYYYMDVW

SEQ ID NO: 67357 - protein, 23 aa, Homo sapiens
CARDYDPSLYYDILTGHGGTDYW

SEQ ID NO: 67358 - protein, 20 aa, Homo sapiens
CAKSASSPGYSSSWGIFDYW

SEQ ID NO: 67359 - protein, 23 aa, Homo sapiens
CAKDTPSEDYYDSSGYNNWFDPW

SEQ ID NO: 67360 - protein, 21 aa, Homo sapiens
CARAFYSSSWPAPRYYYMDVW

SEQ ID NO: 67361 - protein, 19 aa, Homo sapiens
CAKIWEYYDSSGVDAFDIW

SEQ ID NO: 67362 - protein, 16 aa, Homo sapiens
CAKDIMGDTFWYFDLW

SEQ ID NO: 67363 - protein, 21 aa, Homo sapiens
CVHRRLCGSSLCYGLDAFDIW

SEQ ID NO: 67364 - protein, 17 aa, Homo sapiens
CARYYDGIAAAGDLDYW

SEQ ID NO: 67365 - protein, 18 aa, Homo sapiens
CARIPRRVVAAFPSFDYW

SEQ ID NO: 67366 - protein, 19 aa, Homo sapiens
CVREFREIQLWLRTNFDFW

SEQ ID NO: 67367 - protein, 15 aa, Homo sapiens
CARCEYSKSSPYDYW

SEQ ID NO: 67368 - protein, 22 aa, Homo sapiens
CAKDGGSTRLFFRSGNNWFDPW

SEQ ID NO: 67369 - protein, 18 aa, Homo sapiens
CARHWETALVVRGWFDPW

SEQ ID NO: 67370 - protein, 18 aa, Homo sapiens
CARDMQDYGDSNLRFDPW

SEQ ID NO: 67371 - protein, 20 aa, Homo sapiens
CARTPYDRGDFLVLAAFDIW

SEQ ID NO: 67372 - protein, 17 aa, Homo sapiens
CAKLNYDSSGYYYFDYW

SEQ ID NO: 67373 - protein, 16 aa, Homo sapiens
CCKEYSSSSDYYFDYW

SEQ ID NO: 67374 - protein, 20 aa, Homo sapiens
CATFHIAAAGRVYYYYMDVW

SEQ ID NO: 67375 - protein, 21 aa, Homo sapiens
CAKSLGGITMIVVVTPTWDYW

SEQ ID NO: 67376 - protein, 19 aa, Homo sapiens
CARDRGGEYSSSSIWFDPW

SEQ ID NO: 67377 - protein, 15 aa, Homo sapiens
CQVWHSDTAHQGYVF

SEQ ID NO: 67378 - protein, 24 aa, Homo sapiens
CARDVGLGTIFGVVIIPPGGFDYW

SEQ ID NO: 67379 - protein, 17 aa, Homo sapiens
CAKDSLDWNYADRWDYW

SEQ ID NO: 67380 - protein, 21 aa, Homo sapiens
CARVEGACRGESCYVDPFDIW

SEQ ID NO: 67381 - protein, 21 aa, Homo sapiens
CARGGWLTTVTTRSFSAFDIW

SEQ ID NO: 67382 - protein, 18 aa, Homo sapiens
CARGTVVVPAAITSFDIW

SEQ ID NO: 67383 - protein, 22 aa, Homo sapiens
CARNIDPSKYSSGWYRWYFDLW

SEQ ID NO: 67384 - protein, 25 aa, Homo sapiens
CATYPLGHFGSGDYSKRPAKVFDMW

SEQ ID NO: 67385 - protein, 21 aa, Homo sapiens
CTTVGALEVEYRPTSYYFDYW

SEQ ID NO: 67386 - protein, 17 aa, Homo sapiens
CAKGWSGWSLGRYFQHW

SEQ ID NO: 67387 - protein, 26 aa, Homo sapiens
CARDGIFRTEKAPYYYDSSGYSFDYW

SEQ ID NO: 67388 - protein, 15 aa, Homo sapiens
CANPLSRREDAFDIW

SEQ ID NO: 67389 - protein, 15 aa, Homo sapiens
CAMDDFWSGWTFDYW

SEQ ID NO: 67390 - protein, 15 aa, Homo sapiens
CARPEGDYGGYVDNW

SEQ ID NO: 67391 - protein, 25 aa, Homo sapiens
CARRRAGRITIFEESGIREIYFDYW

SEQ ID NO: 67392 - protein, 14 aa, Homo sapiens
CQSYDSSLTGSKIF

SEQ ID NO: 67393 - protein, 22 aa, Homo sapiens
CIKDKGDYLLGTTYYYHGMDVW

SEQ ID NO: 67394 - protein, 15 aa, Homo sapiens
CATAHYLSMGWFDPW

SEQ ID NO: 67395 - protein, 26 aa, Homo sapiens
CARGVVVAATPGNQTTPNYYYGMDVW

SEQ ID NO: 67396 - protein, 14 aa, Homo sapiens
CARYGDYQHELDYW

SEQ ID NO: 67397 - protein, 17 aa, Homo sapiens
CSASHVPGVDAYYFDYW

SEQ ID NO: 67398 - protein, 17 aa, Homo sapiens
CARASTDYTGRYFFDYW

SEQ ID NO: 67399 - protein, 22 aa, Homo sapiens
CARDLYAYYYDDSVYYDVFAYW

SEQ ID NO: 67400 - protein, 18 aa, Homo sapiens
CAKDISTGYDFWSGLDYW

SEQ ID NO: 67401 - protein, 23 aa, Homo sapiens
CVRHYDLWSGYSNYYSYYGMDVW

SEQ ID NO: 67402 - protein, 13 aa, Homo sapiens
CARFWGAANFDLW

SEQ ID NO: 67403 - protein, 26 aa, Homo sapiens
CARGGYCSSTSCSEDFRYYYYGMDVW

SEQ ID NO: 67404 - protein, 29 aa, Homo sapiens
CALPISAFYYCVKDDYYASGNFASNFDCW

SEQ ID NO: 67405 - protein, 17 aa, Homo sapiens
CAHRQTIFGVTDGFDPW

SEQ ID NO: 67406 - protein, 20 aa, Homo sapiens
CAMDQGGSTVISSRLGFDYW

SEQ ID NO: 67407 - protein, 18 aa, Homo sapiens
CARGGSYGDYVLGDFDYW

SEQ ID NO: 67408 - protein, 14 aa, Homo sapiens
CARISPQGPAADYW

SEQ ID NO: 67409 - protein, 25 aa, Homo sapiens
CASLTQNNPDIVLLPAVRKYYFDYW

SEQ ID NO: 67410 - protein, 27 aa, Homo sapiens
CTRDEGRITIFGVVTNPYYYYYYMDVW

SEQ ID NO: 67411 - protein, 23 aa, Homo sapiens
CATDGITMVRGVKGDYYYGMDVW

SEQ ID NO: 67412 - protein, 17 aa, Homo sapiens
CVKAVDSGSDLDAFDIW

SEQ ID NO: 67413 - protein, 18 aa, Homo sapiens
CAKAPDGIVVIITHFDYW

SEQ ID NO: 67414 - protein, 15 aa, Homo sapiens
CARRLWSGYDSFDYW

SEQ ID NO: 67415 - protein, 13 aa, Homo sapiens
CVAGPYFWYFDLW

SEQ ID NO: 67416 - protein, 18 aa, Homo sapiens
CARVGITMIVVVRAFDIW

SEQ ID NO: 67417 - protein, 19 aa, Homo sapiens
CARWEDSTSWFLRGAFDIW

SEQ ID NO: 67418 - protein, 24 aa, Homo sapiens
CASHAGGDDFWSGFDYYYYYMDVW

SEQ ID NO: 67419 - protein, 20 aa, Homo sapiens
CARVVRITIFGVGDNWLDPW

SEQ ID NO: 67420 - protein, 21 aa, Homo sapiens
CARDPLVPNKGHYYYYYMDVW

SEQ ID NO: 67421 - protein, 14 aa, Homo sapiens
CAKLTYYDSPSDYW

SEQ ID NO: 67422 - protein, 22 aa, Homo sapiens
CARQGGSCDGDNCYSNDALDIW

SEQ ID NO: 67423 - protein, 16 aa, Homo sapiens
CARSPWELLPYYFDYW

SEQ ID NO: 67424 - protein, 25 aa, Homo sapiens
CAREEPPQITIFGVVIITGNWFDPW

SEQ ID NO: 67425 - protein, 20 aa, Homo sapiens
CARDDTGWGLMKDNWYFDLW

SEQ ID NO: 67426 - protein, 19 aa, Homo sapiens
CARAPVTRCMLFCRIFDYW

SEQ ID NO: 67427 - protein, 15 aa, Homo sapiens
CARGIGTRADFFDAW

SEQ ID NO: 67428 - protein, 26 aa, Homo sapiens
CARHYYDFWSGYYLSNPYVTGGFDYW

SEQ ID NO: 67429 - protein, 22 aa, Homo sapiens
CARDLPFCRGGSCYLEFYFDSW

SEQ ID NO: 67430 - protein, 20 aa, Homo sapiens
CARDIGDSSGYYYNDELDVW

SEQ ID NO: 67431 - protein, 21 aa, Homo sapiens
CARTVVAATIFNPYYYGMDVW

SEQ ID NO: 67432 - protein, 18 aa, Homo sapiens
CAGFNMAYYDSSGYGDYW

SEQ ID NO: 67433 - protein, 13 aa, Homo sapiens
CAGRGSGWNFDYW

SEQ ID NO: 67434 - protein, 18 aa, Homo sapiens
CARIREYYDSSGRLFDYW

SEQ ID NO: 67435 - protein, 15 aa, Homo sapiens
CARWSGYVYGTFGYW

SEQ ID NO: 67436 - protein, 21 aa, Homo sapiens
CARLHFYGGNTDYHYYYMDVW

SEQ ID NO: 67437 - protein, 22 aa, Homo sapiens
CARREYYDYVWGSYREGIFDYW

SEQ ID NO: 67438 - protein, 15 aa, Homo sapiens
CANTNLEWLDLFDHW

SEQ ID NO: 67439 - protein, 16 aa, Homo sapiens
CAKPRGDYNWNPFDYW

SEQ ID NO: 67440 - protein, 26 aa, Homo sapiens
CARDLKGGGITMVRGVLTRHDAFDIW

SEQ ID NO: 67441 - protein, 19 aa, Homo sapiens
CARSGRVGATTQYNWFDPW

SEQ ID NO: 67442 - protein, 24 aa, Homo sapiens
CAKDIRSGTYFYDSKGQWAALDIW

SEQ ID NO: 67443 - protein, 26 aa, Homo sapiens
CATHARSQAIVLMVYAIPSADAFDIW

SEQ ID NO: 67444 - protein, 32 aa, Homo sapiens
CARAGWRYCSSTSCAREEGFGVVIITDAFDIW

SEQ ID NO: 67445 - protein, 18 aa, Homo sapiens
CASSGPRGRPTPYYFDYW

SEQ ID NO: 67446 - protein, 19 aa, Homo sapiens
CAKAAWGIAVGGHNVFDIW

SEQ ID NO: 67447 - protein, 16 aa, Homo sapiens
CAKASSGSSHTYFDYW

SEQ ID NO: 67448 - protein, 15 aa, Homo sapiens
CARPSLVQGGYFDYW

SEQ ID NO: 67449 - protein, 18 aa, Homo sapiens
CARARVMVPGAAYYFDHW

SEQ ID NO: 67450 - protein, 19 aa, Homo sapiens
CVRGWFRDLIDYYYYMDVW

SEQ ID NO: 67451 - protein, 13 aa, Homo sapiens
CQVWDNSIDHWMF

SEQ ID NO: 67452 - protein, 18 aa, Homo sapiens
CASGSHDYYYYYYYMDVW

SEQ ID NO: 67453 - protein, 14 aa, Homo sapiens
CARGGALYSIFDSW

SEQ ID NO: 67454 - protein, 18 aa, Homo sapiens
CARVGLLAAFWDWYFDLW

SEQ ID NO: 67455 - protein, 19 aa, Homo sapiens
CAKHQGSGWFTGIGGFDIW

SEQ ID NO: 67456 - protein, 16 aa, Homo sapiens
CTRDMEAPGHRPGDYW

SEQ ID NO: 67457 - protein, 17 aa, Homo sapiens
CAKGLPSTKWRGAFDAW

SEQ ID NO: 67458 - protein, 16 aa, Homo sapiens
CARNSDYDFWSVSDYW

SEQ ID NO: 67459 - protein, 16 aa, Homo sapiens
CARLSPPLLDAIPDYW

SEQ ID NO: 67460 - protein, 14 aa, Homo sapiens
CSSYTASTTLAVVF

SEQ ID NO: 67461 - protein, 16 aa, Homo sapiens
CVRQGDGDYLWDFGYW

SEQ ID NO: 67462 - protein, 17 aa, Homo sapiens
CARALRFLLDPDAFDIW

SEQ ID NO: 67463 - protein, 18 aa, Homo sapiens
CAKGKGTVMAQPDVFDIW

SEQ ID NO: 67464 - protein, 22 aa, Homo sapiens
CARDRTYQGSGSEYYYYYMDVW

SEQ ID NO: 67465 - protein, 13 aa, Homo sapiens
CARIYVRGFYDYW

SEQ ID NO: 67466 - protein, 21 aa, Homo sapiens
CARDQSSVIPASKLWGWFDLW

SEQ ID NO: 67467 - protein, 18 aa, Homo sapiens
CAREDDLGHYYYYYMDVW

SEQ ID NO: 67468 - protein, 15 aa, Homo sapiens
CTSKDCYQLGCFDPW

SEQ ID NO: 67469 - protein, 23 aa, Homo sapiens
CARAPGYYGSGSYYNRTPPFDYW

SEQ ID NO: 67470 - protein, 21 aa, Homo sapiens
CAKHLSALHDYDGNVRAFDIW

SEQ ID NO: 67471 - protein, 17 aa, Homo sapiens
CATSETSTTSNSAFDIW

SEQ ID NO: 67472 - protein, 16 aa, Homo sapiens
CAKGCFRSSRDCFDYW

SEQ ID NO: 67473 - protein, 24 aa, Homo sapiens
CATDSPSMRQPLMFGYYYYYMDVW

SEQ ID NO: 67474 - protein, 24 aa, Homo sapiens
CARAIVVVPATQVPAYYYYYMDVW

SEQ ID NO: 67475 - protein, 13 aa, Homo sapiens
CAREAGDGYIDYW

SEQ ID NO: 67476 - protein, 19 aa, Homo sapiens
CARASRPGYFGSDSYFDYW

SEQ ID NO: 67477 - protein, 16 aa, Homo sapiens
CARMDWNDGGNAFDIW

SEQ ID NO: 67478 - protein, 12 aa, Homo sapiens
CARADSNAFDVW

SEQ ID NO: 67479 - protein, 17 aa, Homo sapiens
CARETQYSFGYGQFDYW

SEQ ID NO: 67480 - protein, 18 aa, Homo sapiens
CAKDGGVGASPYWYFDLW

SEQ ID NO: 67481 - protein, 18 aa, Homo sapiens
CATGQFNGSGRPQAFEVW

SEQ ID NO: 67482 - protein, 15 aa, Homo sapiens
CARDRSDTAKHFDYW

SEQ ID NO: 67483 - protein, 18 aa, Homo sapiens
CARGPTYSGTYPLAFDYW

SEQ ID NO: 67484 - protein, 30 aa, Homo sapiens
CARQRLPLNWYYDFWSGYRIQDYYYYMDVW

SEQ ID NO: 67485 - protein, 13 aa, Homo sapiens
CIRGGTYQPYDYW

SEQ ID NO: 67486 - protein, 13 aa, Homo sapiens
CARENWVVALDYW

SEQ ID NO: 67487 - protein, 20 aa, Homo sapiens
CARWGCGGDCLNKEYYFDYW

SEQ ID NO: 67488 - protein, 19 aa, Homo sapiens
CARHSAVRTSSPRVAFDIW

SEQ ID NO: 67489 - protein, 22 aa, Homo sapiens
CARSSHFDSSGYYYVIGYFDLW

SEQ ID NO: 67490 - protein, 18 aa, Homo sapiens
CAKDLIADRSNWYYFDYW

SEQ ID NO: 67491 - protein, 22 aa, Homo sapiens
CARDGKHGGNSESYYYYGMDVW

SEQ ID NO: 67492 - protein, 19 aa, Homo sapiens
CAKDRGLNFFETSGFPDYW

SEQ ID NO: 67493 - protein, 24 aa, Homo sapiens
CARDYPQRPEYDFWSGYFNWFDPW

SEQ ID NO: 67494 - protein, 15 aa, Homo sapiens
CASHLVGATGGFDYW

SEQ ID NO: 67495 - protein, 14 aa, Homo sapiens
CASEIPGEYFFDYW

SEQ ID NO: 67496 - protein, 14 aa, Homo sapiens
CTRRNWSGEYVDTW

SEQ ID NO: 67497 - protein, 20 aa, Homo sapiens
CAHSSHSSSSRNYYYYMDVW

SEQ ID NO: 67498 - protein, 14 aa, Homo sapiens
CTTPVDYWMGLDYW

SEQ ID NO: 67499 - protein, 11 aa, Homo sapiens
CQQSDISSLTF

SEQ ID NO: 67500 - protein, 19 aa, Homo sapiens
CASGGRYYGSGSRTQFDYW

SEQ ID NO: 67501 - protein, 17 aa, Homo sapiens
CARLLGGNLYETAFNIW

SEQ ID NO: 67502 - protein, 14 aa, Homo sapiens
CASGPRPHSAFNVW

SEQ ID NO: 67503 - protein, 18 aa, Homo sapiens
CARHPLDFWSGYAHFDLW

SEQ ID NO: 67504 - protein, 17 aa, Homo sapiens
CWIFGVVPQWYYYMDVW

SEQ ID NO: 67505 - protein, 18 aa, Homo sapiens
CARGEVGGSGIYSYFDYW

SEQ ID NO: 67506 - protein, 22 aa, Homo sapiens
CARHHFITIFGVVIESTPLDYW

SEQ ID NO: 67507 - protein, 14 aa, Homo sapiens
CVHNDVGTAPVDYW

SEQ ID NO: 67508 - protein, 18 aa, Homo sapiens
CARDLMVRGNGRGAFDIW

SEQ ID NO: 67509 - protein, 18 aa, Homo sapiens
CARRPGNPDSSSADFDYW

SEQ ID NO: 67510 - protein, 14 aa, Homo sapiens
CAKDRRDDWYFDLW

SEQ ID NO: 67511 - protein, 14 aa, Homo sapiens
CAREYAPHTLVDYW

SEQ ID NO: 67512 - protein, 10 aa, Homo sapiens
CLQTLQTPSF

SEQ ID NO: 67513 - protein, 13 aa, Homo sapiens
CAKFTGDWYFDFW

SEQ ID NO: 67514 - protein, 21 aa, Homo sapiens
CARGEAGTSSYYYYYYYMDVW

SEQ ID NO: 67515 - protein, 27 aa, Homo sapiens
CARDPSRLGYCSGGSCPTPKGDAFDIW

SEQ ID NO: 67516 - protein, 24 aa, Homo sapiens
CTTDIENEAGFLEWSPPYWYFDLW

SEQ ID NO: 67517 - protein, 21 aa, Homo sapiens
CAYGYCSSTSCYDYYYGMDVW

SEQ ID NO: 67518 - protein, 18 aa, Homo sapiens
CARHAEHCEPGTCELDYW

SEQ ID NO: 67519 - protein, 17 aa, Homo sapiens
CAKPIGYCSGGSFCDYW

SEQ ID NO: 67520 - protein, 15 aa, Homo sapiens
CARVVPPKGDWFDPW

SEQ ID NO: 67521 - protein, 15 aa, Homo sapiens
CARGKYGSSLCLDYW

SEQ ID NO: 67522 - protein, 13 aa, Homo sapiens
CARGTEAELFDIW

SEQ ID NO: 67523 - protein, 25 aa, Homo sapiens
CARVRFGITMIVVVIPYYYYYMDVW

SEQ ID NO: 67524 - protein, 25 aa, Homo sapiens
CARGGHDLPLTMIVVVISFSAFDIW

SEQ ID NO: 67525 - protein, 22 aa, Homo sapiens
CARHGSMNRGVRGIYYYYMDVW

SEQ ID NO: 67526 - protein, 28 aa, Homo sapiens
CARGLIQRTIFGVVIPTRGVLYNWFDPW

SEQ ID NO: 67527 - protein, 13 aa, Homo sapiens
CARRAAYSHFDNW

SEQ ID NO: 67528 - protein, 21 aa, Homo sapiens
CAKVESGYCGSDSCPRAFDIW

SEQ ID NO: 67529 - protein, 22 aa, Homo sapiens
CARQEGSLWFGEVIHPRLIDYW

SEQ ID NO: 67530 - protein, 18 aa, Homo sapiens
CAKAVAYNWNLNPYFDHW

SEQ ID NO: 67531 - protein, 23 aa, Homo sapiens
CAKDHPPGGSMVRGVIITNFDYW

SEQ ID NO: 67532 - protein, 16 aa, Homo sapiens
CATGFLRNFFHWFDPW

SEQ ID NO: 67533 - protein, 18 aa, Homo sapiens
CVKSLRYQLVSSSAFDIW

SEQ ID NO: 67534 - protein, 15 aa, Homo sapiens
CVRQAGGGTYYFDNW

SEQ ID NO: 67535 - protein, 19 aa, Homo sapiens
CAREKPGRFGELLSWFDPW

SEQ ID NO: 67536 - protein, 25 aa, Homo sapiens
CARDLRYYYDSSGEPHYYYYGMDVW

SEQ ID NO: 67537 - protein, 20 aa, Homo sapiens
CAVPLSYYYDSSGYYWRDYW

SEQ ID NO: 67538 - protein, 17 aa, Homo sapiens
CARSASRFLEWFRFDLW

SEQ ID NO: 67539 - protein, 22 aa, Homo sapiens
CAKRRVAAAGTGGSYYYYMDVW

SEQ ID NO: 67540 - protein, 17 aa, Homo sapiens
CVKESSQSSDWWVFDYW

SEQ ID NO: 67541 - protein, 20 aa, Homo sapiens
CATTSLHSSGWYGVDYFDYW

SEQ ID NO: 67542 - protein, 19 aa, Homo sapiens
CAKGVITIFGVVDYYMDVW

SEQ ID NO: 67543 - protein, 23 aa, Homo sapiens
CAKDFAGSLGYCSSHEGCAFDIW

SEQ ID NO: 67544 - protein, 16 aa, Homo sapiens
CARESRTDGTYYSDSW

SEQ ID NO: 67545 - protein, 21 aa, Homo sapiens
CARAIIDYDFWSGYYQAFDYW

SEQ ID NO: 67546 - protein, 17 aa, Homo sapiens
CTRDWESAYDNSYFDQW

SEQ ID NO: 67547 - protein, 17 aa, Homo sapiens
CARHSLSGRRGYSLDYW

SEQ ID NO: 67548 - protein, 21 aa, Homo sapiens
CARNAKFRDFSDSRWGWFDPW

SEQ ID NO: 67549 - protein, 25 aa, Homo sapiens
CATAGEVVVAPMGGSQASEYYLEYW

SEQ ID NO: 67550 - protein, 15 aa, Homo sapiens
CARGVRPLYNWFDPW

SEQ ID NO: 67551 - protein, 17 aa, Homo sapiens
CARLMATMTAISAYDIW

SEQ ID NO: 67552 - protein, 16 aa, Homo sapiens
CARDRISEGATGFDYW

SEQ ID NO: 67553 - protein, 18 aa, Homo sapiens
CARDHSPLYRSSWPLDYW

SEQ ID NO: 67554 - protein, 19 aa, Homo sapiens
CARHFMMGPIYYYYYMDVW

SEQ ID NO: 67555 - protein, 15 aa, Homo sapiens
CGRNLPEVSGPVDYW

SEQ ID NO: 67556 - protein, 16 aa, Homo sapiens
CAKVWYGSAAAAIDYW

SEQ ID NO: 67557 - protein, 15 aa, Homo sapiens
CARDFGSADYYYAYW

SEQ ID NO: 67558 - protein, 25 aa, Homo sapiens
CVKNRVDDSDDDYYYVPDAEYFHHW

SEQ ID NO: 67559 - protein, 14 aa, Homo sapiens
CARDLPGITYFDPW

SEQ ID NO: 67560 - protein, 20 aa, Homo sapiens
CARIPHCSSTSCLLNPFDYW

SEQ ID NO: 67561 - protein, 21 aa, Homo sapiens
CARDGGLTIFGVGKGYYFDYW

SEQ ID NO: 67562 - protein, 24 aa, Homo sapiens
CARDAYYDFWSGPRWFYYYYMDVW

SEQ ID NO: 67563 - protein, 24 aa, Homo sapiens
CARPPRGYYDSSGYYYSENYFDYW

SEQ ID NO: 67564 - protein, 18 aa, Homo sapiens
CARVGGKQWLVNQAFDIW

SEQ ID NO: 67565 - protein, 13 aa, Homo sapiens
CARDRPGSAHDYW

SEQ ID NO: 67566 - protein, 18 aa, Homo sapiens
CARARVTGTTYYYGMDVW

SEQ ID NO: 67567 - protein, 11 aa, Homo sapiens
CHQYNSYADTF

SEQ ID NO: 67568 - protein, 16 aa, Homo sapiens
CCRGTGGQWEPRFDSW

SEQ ID NO: 67569 - protein, 16 aa, Homo sapiens
CAKGRHTVIPYFFDYW

SEQ ID NO: 67570 - protein, 12 aa, Homo sapiens
CIPPPGPVSDYW

SEQ ID NO: 67571 - protein, 16 aa, Homo sapiens
CAKAAATGRGGAFDMW

SEQ ID NO: 67572 - protein, 24 aa, Homo sapiens
CAKDIGVTMVRGVIRYYYYGMDVW

SEQ ID NO: 67573 - protein, 17 aa, Homo sapiens
CVRDPGKTLAGTVVDYW

SEQ ID NO: 67574 - protein, 20 aa, Homo sapiens
CAKDTLSFYYGDYVTWFDYW

SEQ ID NO: 67575 - protein, 20 aa, Homo sapiens
CARLLNTRGYSYGGSAFDIW

SEQ ID NO: 67576 - protein, 17 aa, Homo sapiens
CAKVTTVVVVTHAFDIW

SEQ ID NO: 67577 - protein, 17 aa, Homo sapiens
CAHIEHSRIFPNCFDPW

SEQ ID NO: 67578 - protein, 15 aa, Homo sapiens
CACRLGWSANDFDYW

SEQ ID NO: 67579 - protein, 22 aa, Homo sapiens
CQQFNSYPSITFGQGTRLEITF

SEQ ID NO: 67580 - protein, 13 aa, Homo sapiens
CQRRSTWPPKFTF

SEQ ID NO: 67581 - protein, 26 aa, Homo sapiens
CARVPRDDFWSGYYSVIKGVGAFDIW

SEQ ID NO: 67582 - protein, 15 aa, Homo sapiens
CASFSQFGEYPFDYW

SEQ ID NO: 67583 - protein, 20 aa, Homo sapiens
CATDRRWLQLGQGSNWFDPW

SEQ ID NO: 67584 - protein, 15 aa, Homo sapiens
CARAVAGPLGAFDLW

SEQ ID NO: 67585 - protein, 24 aa, Homo sapiens
CAKDREDSGITIFGVVIKGGFDYW

SEQ ID NO: 67586 - protein, 18 aa, Homo sapiens
CAKATRFYSKGGDWFDPW

SEQ ID NO: 67587 - protein, 19 aa, Homo sapiens
CARGNPIAAAGAYPQFDYW

SEQ ID NO: 67588 - protein, 19 aa, Homo sapiens
CARDSGGSSWYQSFAFDIW

SEQ ID NO: 67589 - protein, 19 aa, Homo sapiens
CASHYDSSGYYYEFAFDIW

SEQ ID NO: 67590 - protein, 16 aa, Homo sapiens
CAKGPEVTGYYPVDYW

SEQ ID NO: 67591 - protein, 17 aa, Homo sapiens
CAKDRGAVAGNSWIDPW

SEQ ID NO: 67592 - protein, 17 aa, Homo sapiens
CARMVVGATLYDYMDVW

SEQ ID NO: 67593 - protein, 14 aa, Homo sapiens
CVRDAGRGSRGDYW

SEQ ID NO: 67594 - protein, 17 aa, Homo sapiens
CARDGMRQLDLDAFDIW

SEQ ID NO: 67595 - protein, 16 aa, Homo sapiens
CARAPLPYWADAFDIW

SEQ ID NO: 67596 - protein, 13 aa, Homo sapiens
CARVLLIWSDDYW

SEQ ID NO: 67597 - protein, 26 aa, Homo sapiens
CAREFGYCTNGVCNTYYYYYYGMDVW

SEQ ID NO: 67598 - protein, 16 aa, Homo sapiens
CARDGWQWEGGSFDYW

SEQ ID NO: 67599 - protein, 20 aa, Homo sapiens
CARVDDTPKAGSNFYYLDVW

SEQ ID NO: 67600 - protein, 23 aa, Homo sapiens
CARGGPDYDFWSGYVPPPGGDYW

SEQ ID NO: 67601 - protein, 14 aa, Homo sapiens
CARNIVGTTSLDYW

SEQ ID NO: 67602 - protein, 22 aa, Homo sapiens
CTTQNFITYYDFWSGYFYFDYW

SEQ ID NO: 67603 - protein, 23 aa, Homo sapiens
CARVGYSGYDMTREYYYYGMDVW

SEQ ID NO: 67604 - protein, 22 aa, Homo sapiens
CARSITRGYRDMLTGLLGLDYW

SEQ ID NO: 67605 - protein, 17 aa, Homo sapiens
CARIQWELSPVGAFDIW

SEQ ID NO: 67606 - protein, 21 aa, Homo sapiens
CAKQLSSQHDDNEDLRAFDVW

SEQ ID NO: 67607 - protein, 17 aa, Homo sapiens
CARDVQIGVLLDAFDIW

SEQ ID NO: 67608 - protein, 18 aa, Homo sapiens
CARHLIPGYSQSSAPDYW

SEQ ID NO: 67609 - protein, 14 aa, Homo sapiens
CARTGPPPARFDYW

SEQ ID NO: 67610 - protein, 16 aa, Homo sapiens
CAKDAATVRLWYFDLW

SEQ ID NO: 67611 - protein, 19 aa, Homo sapiens
CARDWPNYYATIPSALDVW

SEQ ID NO: 67612 - protein, 24 aa, Homo sapiens
CARGGCSSTSCYTPPYYYYYMDVW

SEQ ID NO: 67613 - protein, 22 aa, Homo sapiens
CARGGWGRPPNQKYYYYYMDVW

SEQ ID NO: 67614 - protein, 16 aa, Homo sapiens
CSLTYRGYDPDAFDVW

SEQ ID NO: 67615 - protein, 21 aa, Homo sapiens
CVRAYYHFWSGLNYYYYMDVW

SEQ ID NO: 67616 - protein, 14 aa, Homo sapiens
CAHKRPGVGAFDVW

SEQ ID NO: 67617 - protein, 14 aa, Homo sapiens
CACGLWEFHPIDYW

SEQ ID NO: 67618 - protein, 23 aa, Homo sapiens
CARAREYQLLPMVRGVIQAFDYW

SEQ ID NO: 67619 - protein, 14 aa, Homo sapiens
CKRSLFYYSYMDVW

SEQ ID NO: 67620 - protein, 16 aa, Homo sapiens
CAKRNALDQWAAFDIW

SEQ ID NO: 67621 - protein, 16 aa, Homo sapiens
CAREGGYSDWGWKDYW

SEQ ID NO: 67622 - protein, 15 aa, Homo sapiens
CARDPEIVVGLIDYW

SEQ ID NO: 67623 - protein, 22 aa, Homo sapiens
CARDQRFLEWLLPSYYYYMDVW

SEQ ID NO: 67624 - protein, 22 aa, Homo sapiens
CARSYPVRPIFGPVGSYYMDVW

SEQ ID NO: 67625 - protein, 18 aa, Homo sapiens
CARGGRLDQSWDYYFDYW

SEQ ID NO: 67626 - protein, 19 aa, Homo sapiens
CARAIFYRSGPDPDAFDLW

SEQ ID NO: 67627 - protein, 15 aa, Homo sapiens
CQVWDSGRDHHGVVF

SEQ ID NO: 67628 - protein, 18 aa, Homo sapiens
CAKDLGMTTVPPHYFEHW

SEQ ID NO: 67629 - protein, 16 aa, Homo sapiens
CARGEGFLEWLGLDYW

SEQ ID NO: 67630 - protein, 17 aa, Homo sapiens
CARGEEWLQLAAGVDYW

SEQ ID NO: 67631 - protein, 20 aa, Homo sapiens
CARLNGDFPTGYYYYYTDVW

SEQ ID NO: 67632 - protein, 23 aa, Homo sapiens
CAHTTERTIFGVVIIPDEYFQHW

SEQ ID NO: 67633 - protein, 23 aa, Homo sapiens
CAGERLRFLESKQYYYYYYMDVW

SEQ ID NO: 67634 - protein, 17 aa, Homo sapiens
CAKDLYSSSPYWYFDLW

SEQ ID NO: 67635 - protein, 19 aa, Homo sapiens
CARDYYDSSGYRLSSTDYW

SEQ ID NO: 67636 - protein, 23 aa, Homo sapiens
CARDDTGPQIERITMIVGGFDPW

SEQ ID NO: 67637 - protein, 21 aa, Homo sapiens
CARDTSADSSGYYYVPHFDYW

SEQ ID NO: 67638 - protein, 18 aa, Homo sapiens
CARDSNSLVAAAGTADYW

SEQ ID NO: 67639 - protein, 15 aa, Homo sapiens
CARESSSTWMDFDYW

SEQ ID NO: 67640 - protein, 20 aa, Homo sapiens
CARGGWGKATMVRGVYFDYW

SEQ ID NO: 67641 - protein, 14 aa, Homo sapiens
CARHFLITGYMDVW

SEQ ID NO: 67642 - protein, 17 aa, Homo sapiens
CARDIVPLEGGDAFDIW

SEQ ID NO: 67643 - protein, 15 aa, Homo sapiens
CARSTTLVTPSFDYW

SEQ ID NO: 67644 - protein, 16 aa, Homo sapiens
CVKARGIVMGDEFDIW

SEQ ID NO: 67645 - protein, 16 aa, Homo sapiens
CAKAPNWGSGGPFDLW

SEQ ID NO: 67646 - protein, 11 aa, Homo sapiens
CHQYYSTAQSF

SEQ ID NO: 67647 - protein, 23 aa, Homo sapiens
CATLSPTYYYDTSGHYAPYFDSW

SEQ ID NO: 67648 - protein, 15 aa, Homo sapiens
CAKSETGEGTHFDNW

SEQ ID NO: 67649 - protein, 17 aa, Homo sapiens
CARQSFLTGYSYYFDQW

SEQ ID NO: 67650 - protein, 21 aa, Homo sapiens
CARGVTTVTTSGRGGRLFDLW

SEQ ID NO: 67651 - protein, 16 aa, Homo sapiens
CARDVYSTSYHLGDYW

SEQ ID NO: 67652 - protein, 14 aa, Homo sapiens
CARILYDFYYFDYW

SEQ ID NO: 67653 - protein, 18 aa, Homo sapiens
CARVISVGATPLWAFDIW

SEQ ID NO: 67654 - protein, 22 aa, Homo sapiens
CARGGRVYYDFWSGQQNWFDPW

SEQ ID NO: 67655 - protein, 11 aa, Homo sapiens
CQQSHITSHTF

SEQ ID NO: 67656 - protein, 21 aa, Homo sapiens
CARVFLDLNSVTTLPYYFDYW

SEQ ID NO: 67657 - protein, 22 aa, Homo sapiens
CARSRGNCYHATCYSPHYFDSW

SEQ ID NO: 67658 - protein, 19 aa, Homo sapiens
CVRDWEFDYDPIGYCFDYW

SEQ ID NO: 67659 - protein, 23 aa, Homo sapiens
CARDFYNDFWTGYYGANGHFDYW

SEQ ID NO: 67660 - protein, 22 aa, Homo sapiens
CARERNYYDSSGYYYGLYFDYW

SEQ ID NO: 67661 - protein, 24 aa, Homo sapiens
CARLIVVAPPPRYQGEKNYYFDSW

SEQ ID NO: 67662 - protein, 19 aa, Homo sapiens
CAKDRDDSSALPHWYFHLW

SEQ ID NO: 67663 - protein, 24 aa, Homo sapiens
CARDLFVTATHNRSYYYYYGMDVW

SEQ ID NO: 67664 - protein, 18 aa, Homo sapiens
CARAPSGSGSPIYYFDYW

SEQ ID NO: 67665 - protein, 23 aa, Homo sapiens
CAISYCGHSRCYLSSPSRPFDYW

SEQ ID NO: 67666 - protein, 15 aa, Homo sapiens
CAKNMWGNVDAFDIW

SEQ ID NO: 67667 - protein, 20 aa, Homo sapiens
CARPHVLLWFEDFHYYFDYW

SEQ ID NO: 67668 - protein, 26 aa, Homo sapiens
CVRHTEYYDSSGYHYATGYRGHFDYW

SEQ ID NO: 67669 - protein, 19 aa, Homo sapiens
CATPEGYCNSHDCFSLDYW

SEQ ID NO: 67670 - protein, 24 aa, Homo sapiens
CARDPIHYSPYDILTGYYFPFDYW

SEQ ID NO: 67671 - protein, 19 aa, Homo sapiens
CAKDYYDFWSGYPTPFDYW

SEQ ID NO: 67672 - protein, 24 aa, Homo sapiens
CARDLTTVAGTGESYYYYYGMDVW

SEQ ID NO: 67673 - protein, 22 aa, Homo sapiens
CARVGYSSTWAPSYYYYYMDVW

SEQ ID NO: 67674 - protein, 12 aa, Homo sapiens
CATGPYYYLDLW

SEQ ID NO: 67675 - protein, 16 aa, Homo sapiens
CARMFGSTWDRPFDLW

SEQ ID NO: 67676 - protein, 19 aa, Homo sapiens
CARGEFRQQLVRYYYMDVW

SEQ ID NO: 67677 - protein, 19 aa, Homo sapiens
CAKDSRLXXLGADYXFDYW

SEQ ID NO: 67678 - protein, 14 aa, Homo sapiens
CGTRSNYFEYFDSW

SEQ ID NO: 67679 - protein, 21 aa, Homo sapiens
CARDRNYYDILTGYYTAFDYW

SEQ ID NO: 67680 - protein, 17 aa, Homo sapiens
CAKAYSTGGVRDVFDMW

SEQ ID NO: 67681 - protein, 15 aa, Homo sapiens
CARTVVVTAPLNDYW

SEQ ID NO: 67682 - protein, 13 aa, Homo sapiens
CASGPNDYYFDFW

SEQ ID NO: 67683 - protein, 17 aa, Homo sapiens
CASGRYSSDRVSAFDIW

SEQ ID NO: 67684 - protein, 18 aa, Homo sapiens
CARGAYSSSWPFNWFDPW

SEQ ID NO: 67685 - protein, 24 aa, Homo sapiens
CARGLPYYDFWSAERYYYHGMDVW

SEQ ID NO: 67686 - protein, 17 aa, Homo sapiens
CARGSGQPATVGATDYW

SEQ ID NO: 67687 - protein, 23 aa, Homo sapiens
CARAPGILHCSSTSCYHPWFDPW

SEQ ID NO: 67688 - protein, 15 aa, Homo sapiens
CARDSQSYAVATDYW

SEQ ID NO: 67689 - protein, 23 aa, Homo sapiens
CARWFVTGTFCSSTNCQPNFDYW

SEQ ID NO: 67690 - protein, 17 aa, Homo sapiens
CARRTYTYGLTFYFDYW

SEQ ID NO: 67691 - protein, 26 aa, Homo sapiens
CARDRGFYYFDSSDLDNFGVDALDIW

SEQ ID NO: 67692 - protein, 24 aa, Homo sapiens
CARDRGHAPYTIFGVVNSNWFDPW

SEQ ID NO: 67693 - protein, 23 aa, Homo sapiens
CAKGSPNYDSGSHGAVLGFFDVW

SEQ ID NO: 67694 - protein, 16 aa, Homo sapiens
CARGWQLGWENWFDPW

SEQ ID NO: 67695 - protein, 20 aa, Homo sapiens
CARARGTIFGVVIQPYFDYW

SEQ ID NO: 67696 - protein, 17 aa, Homo sapiens
CARVYSSSGYWAAFDYW

SEQ ID NO: 67697 - protein, 21 aa, Homo sapiens
CVRGEGFYDSSGYYWFYFDYW

SEQ ID NO: 67698 - protein, 19 aa, Homo sapiens
CARLHYYDSNAYTYYFDYW

SEQ ID NO: 67699 - protein, 17 aa, Homo sapiens
CARGTGDFEETGYFDLW

SEQ ID NO: 67700 - protein, 14 aa, Homo sapiens
CADRLITGDAFDTW

SEQ ID NO: 67701 - protein, 21 aa, Homo sapiens
CARDLSPYYYGSGSHDRPDYW

SEQ ID NO: 67702 - protein, 15 aa, Homo sapiens
CARPDVDWGSYFNYW

SEQ ID NO: 67703 - protein, 21 aa, Homo sapiens
CASAPFGVVRTNYYYYYMDVW

SEQ ID NO: 67704 - protein, 17 aa, Homo sapiens
CAREAYDFSRRYYFDFW

SEQ ID NO: 67705 - protein, 21 aa, Homo sapiens
CARDNGCRAGNNWYRCRFDPW

SEQ ID NO: 67706 - protein, 17 aa, Homo sapiens
CARRLVVSWGTGYFDLW

SEQ ID NO: 67707 - protein, 15 aa, Homo sapiens
CNSRDSSNTHLQVLF

SEQ ID NO: 67708 - protein, 22 aa, Homo sapiens
CAKDFSSYKGYDFFIGQYFDYW

SEQ ID NO: 67709 - protein, 17 aa, Homo sapiens
CAKDYRDVVVAIDSDYW

SEQ ID NO: 67710 - protein, 16 aa, Homo sapiens
CTRGIELRGTWSFDYW

SEQ ID NO: 67711 - protein, 17 aa, Homo sapiens
CAKVNAMNTRGYYMDVW

SEQ ID NO: 67712 - protein, 17 aa, Homo sapiens
CARVLTYGSENYYFDYW

SEQ ID NO: 67713 - protein, 15 aa, Homo sapiens
CGTWDSSLGGVLWVF

SEQ ID NO: 67714 - protein, 16 aa, Homo sapiens
CARLHGIAAAGPLDYW

SEQ ID NO: 67715 - protein, 21 aa, Homo sapiens
CAKDFQFVGEAHFYYYGMDVW

SEQ ID NO: 67716 - protein, 23 aa, Homo sapiens
CARDSFSVVAVNVYYYYYGMDVW

SEQ ID NO: 67717 - protein, 18 aa, Homo sapiens
CQVWHSSSDSWVFGAWVF

SEQ ID NO: 67718 - protein, 20 aa, Homo sapiens
CARALDETVTPYHYYYMDVW

SEQ ID NO: 67719 - protein, 11 aa, Homo sapiens
CVRGWASPDYW

SEQ ID NO: 67720 - protein, 18 aa, Homo sapiens
CAKDALRARLAYNWFDPW

SEQ ID NO: 67721 - protein, 16 aa, Homo sapiens
CARDAGLGVSGWFDPW

SEQ ID NO: 67722 - protein, 16 aa, Homo sapiens
CASEGYYDSSPPFDYW

SEQ ID NO: 67723 - protein, 17 aa, Homo sapiens
CARLKGWSGYSNWFDPW

SEQ ID NO: 67724 - protein, 19 aa, Homo sapiens
CAKALYDSSGYRAVAFDIW

SEQ ID NO: 67725 - protein, 25 aa, Homo sapiens
CARDKGGSYYYDSSGYYFANAFDIW

SEQ ID NO: 67726 - protein, 15 aa, Homo sapiens
CAREGDVGSYYFDRW

SEQ ID NO: 67727 - protein, 21 aa, Homo sapiens
CASQYSSSSPYYYYYYGMDVW

SEQ ID NO: 67728 - protein, 20 aa, Homo sapiens
CVHSPTYYYDKSGCDAFDFW

SEQ ID NO: 67729 - protein, 19 aa, Homo sapiens
CARNKVVVPTAHPARFDPW

SEQ ID NO: 67730 - protein, 15 aa, Homo sapiens
CAREVIWPKQPGDYW

SEQ ID NO: 67731 - protein, 17 aa, Homo sapiens
CTRTGRGYSYGTHFEYW

SEQ ID NO: 67732 - protein, 18 aa, Homo sapiens
CAHRRSSFFVRELLFDYW

SEQ ID NO: 67733 - protein, 14 aa, Homo sapiens
CAQRVGVAGKFDSW

SEQ ID NO: 67734 - protein, 21 aa, Homo sapiens
CARVGLRITIFGVVGNAFDIW

SEQ ID NO: 67735 - protein, 13 aa, Homo sapiens [sequence omitted]

SEQ ID NO: 67736 - protein, 14 aa, Homo sapiens
CARGRGTFDAFDTW

SEQ ID NO: 67737 - protein, 15 aa, Homo sapiens
CAKVRLRKLAEFDYW

SEQ ID NO: 67738 - protein, 23 aa, Homo sapiens
CAKDEEEYDYVWGSYRYGLTDYW

SEQ ID NO: 67739 - protein, 20 aa, Homo sapiens
CASLANLVYGDYTAEPGDYW

SEQ ID NO: 67740 - protein, 15 aa, Homo sapiens
CARNSGTYYSAFDSW

SEQ ID NO: 67741 - protein, 19 aa, Homo sapiens
CAKDRKWLTTGDFDAFDIW

SEQ ID NO: 67742 - protein, 28 aa, Homo sapiens
CAKDWTNSRSIAAAGLFGVYYYYYMDVW

SEQ ID NO: 67743 - protein, 20 aa, Homo sapiens
CARDGGLRFLEWLSVWFDPW

SEQ ID NO: 67744 - protein, 17 aa, Homo sapiens
CARWVQKGWAQDAFDIW

SEQ ID NO: 67745 - protein, 17 aa, Homo sapiens
CAKDIGDGYVVDAFDIW

SEQ ID NO: 67746 - protein, 15 aa, Homo sapiens
CAKLTGATGEPFDIW

SEQ ID NO: 67747 - protein, 15 aa, Homo sapiens
CAKVAGSGWAYFDHW

SEQ ID NO: 67748 - protein, 21 aa, Homo sapiens
CAHRRGEQWLVSDPGGGFDYW

SEQ ID NO: 67749 - protein, 16 aa, Homo sapiens
CARIRWHGYSYGYDYW

SEQ ID NO: 67750 - protein, 17 aa, Homo sapiens
CARTNWGSRIFDAFDLW

SEQ ID NO: 67751 - protein, 23 aa, Homo sapiens
CVRGCSDGGCYLRGPPHDAFDIW

SEQ ID NO: 67752 - protein, 13 aa, Homo sapiens
CAREGIAGAFDPW

SEQ ID NO: 67753 - protein, 20 aa, Homo sapiens
CARDTLNKIFEAYYYGMDVW

SEQ ID NO: 67754 - protein, 18 aa, Homo sapiens
CVKDFAVGATAKFAFDYW

SEQ ID NO: 67755 - protein, 16 aa, Homo sapiens
CAKDPSDRYGDYSDYW

SEQ ID NO: 67756 - protein, 20 aa, Homo sapiens
CARAGIYTYDLTLHNAFDYW

SEQ ID NO: 67757 - protein, 22 aa, Homo sapiens
CVRGSHTHILYDILTGQFFDAW

SEQ ID NO: 67758 - protein, 17 aa, Homo sapiens
CAKGPDSNYGYRVFDYW

SEQ ID NO: 67759 - protein, 14 aa, Homo sapiens
CARAWLAAAGVDYW

SEQ ID NO: 67760 - protein, 19 aa, Homo sapiens
CARDFSYYDSSGSYAFDMW

SEQ ID NO: 67761 - protein, 15 aa, Homo sapiens
CAKYGLIMGWYLDLW

SEQ ID NO: 67762 - protein, 21 aa, Homo sapiens
CATLSIAALRAVYYYYGMDVW

SEQ ID NO: 67763 - protein, 21 aa, Homo sapiens
CARSLMLVVPAVVGGSWFDPW

SEQ ID NO: 67764 - protein, 20 aa, Homo sapiens
CARDLIPDIVVVPPHGFDIW

SEQ ID NO: 67765 - protein, 17 aa, Homo sapiens
CARRVFKYSSSWNFDYW

SEQ ID NO: 67766 - protein, 16 aa, Homo sapiens
CTTDRGIASRPLFDYW

SEQ ID NO: 67767 - protein, 20 aa, Homo sapiens
CARDPGSHYHVLRLGWFDSW

SEQ ID NO: 67768 - protein, 18 aa, Homo sapiens
CARTLSTTWWNYDAFDIW

SEQ ID NO: 67769 - protein, 14 aa, Homo sapiens
CARLVAATIGFDYW

SEQ ID NO: 67770 - protein, 25 aa, Homo sapiens
CASHCSGNNCPNGVYYYYYYPMDVW

SEQ ID NO: 67771 - protein, 25 aa, Homo sapiens
CARGLRGCSSTSCYYVRETGHFDYW

SEQ ID NO: 67772 - protein, 14 aa, Homo sapiens
CASHSENYLTLDYW

SEQ ID NO: 67773 - protein, 24 aa, Homo sapiens
CARSPGSYSSSWSPPWFPLPFDYW

SEQ ID NO: 67774 - protein, 17 aa, Homo sapiens
CARDAVYSIITGWFDPW

SEQ ID NO: 67775 - protein, 24 aa, Homo sapiens
CARAIKVAITMIVVDSSPDAFDIW

SEQ ID NO: 67776 - protein, 15 aa, Homo sapiens
CARLGSVTPGAFDIW

SEQ ID NO: 67777 - protein, 17 aa, Homo sapiens
CARRLTFFGVAEAFDIW

SEQ ID NO: 67778 - protein, 18 aa, Homo sapiens
CALMGCSGGGCSSAFDVW

SEQ ID NO: 67779 - protein, 17 aa, Homo sapiens
CAKDLQRENFVHYCDYW

SEQ ID NO: 67780 - protein, 19 aa, Homo sapiens
CARFSRPNYYDISGYYDNW

SEQ ID NO: 67781 - protein, 18 aa, Homo sapiens
CSSYISTSTLTLPTLWVF

SEQ ID NO: 67782 - protein, 17 aa, Homo sapiens
CARALGTSYGSYKFDFW

SEQ ID NO: 67783 - protein, 18 aa, Homo sapiens
CARHSRDILTGMHYFDPW

SEQ ID NO: 67784 - protein, 21 aa, Homo sapiens
CARRGQTAMAVGGLLYYFDYW

SEQ ID NO: 67785 - protein, 14 aa, Homo sapiens
CARVWSNSREFDYW

SEQ ID NO: 67786 - protein, 24 aa, Homo sapiens
CARSQAADITMIVVVNITPVYDYW

SEQ ID NO: 67787 - protein, 16 aa, Homo sapiens
CARIIIGGYAYYFDYW

SEQ ID NO: 67788 - protein, 17 aa, Homo sapiens
CAGDFWSGYHYYGMDVW

SEQ ID NO: 67789 - protein, 17 aa, Homo sapiens
CARNPDFWRGYDAFDMW

SEQ ID NO: 67790 - protein, 20 aa, Homo sapiens
CARRPERYDSSGREGAFDIW

SEQ ID NO: 67791 - protein, 19 aa, Homo sapiens
CARASLDVTGWYISSFDIW

SEQ ID NO: 67792 - protein, 19 aa, Homo sapiens
CATSSSSIAVAVDDAFDIW

SEQ ID NO: 67793 - protein, 20 aa, Homo sapiens
CARDRIASITMIVVSAFDIW

SEQ ID NO: 67794 - protein, 14 aa, Homo sapiens
CAILGGSLLRFDNW

SEQ ID NO: 67795 - protein, 12 aa, Homo sapiens
CALLGLRARDYW

SEQ ID NO: 67796 - protein, 22 aa, Homo sapiens
CAAVRSVYYDFWSGSNNWFDPW

SEQ ID NO: 67797 - protein, 19 aa, Homo sapiens
CARGAYDVLTSDKPHFDSW

SEQ ID NO: 67798 - protein, 30 aa, Homo sapiens
CAKKQSTPYIPSSIVTPRKQMKRVDVFDVW

SEQ ID NO: 67799 - protein, 18 aa, Homo sapiens
CATGAAGIEVLYRWFDPW

SEQ ID NO: 67800 - protein, 23 aa, Homo sapiens
CARHAAVLRFLEWLPPFGAFDIW

SEQ ID NO: 67801 - protein, 25 aa, Homo sapiens
CARRRTEHKITMIVVVTTPGAFDIW

SEQ ID NO: 67802 - protein, 13 aa, Homo sapiens
CQQSSSNSIPPTF

SEQ ID NO: 67803 - protein, 23 aa, Homo sapiens
CAKAGDSDSWSGYFASNWYFDLW

SEQ ID NO: 67804 - protein, 15 aa, Homo sapiens
CARDRGWLQSHFDYW

SEQ ID NO: 67805 - protein, 19 aa, Homo sapiens
CAKGPYYSISTAYPPLDYW

SEQ ID NO: 67806 - protein, 18 aa, Homo sapiens
CAKASAYYYGSGSHVDYW

SEQ ID NO: 67807 - protein, 19 aa, Homo sapiens
CARASSVTIFGVVGWFDPW

SEQ ID NO: 67808 - protein, 13 aa, Homo sapiens
CAHPGLAGDFDYW

SEQ ID NO: 67809 - protein, 13 aa, Homo sapiens
CARDPVMGYFDLW

SEQ ID NO: 67810 - protein, 23 aa, Homo sapiens
CARVRTYMITFGGVIETYYFDYW

SEQ ID NO: 67811 - protein, 17 aa, Homo sapiens
CVKEREQHLVSFLFDSW

SEQ ID NO: 67812 - protein, 19 aa, Homo sapiens
CARAPRYSGSYPPPLFDYW

SEQ ID NO: 67813 - protein, 26 aa, Homo sapiens
CVRAVDWPAVIDVQVATTGWWYFDLW

SEQ ID NO: 67814 - protein, 19 aa, Homo sapiens
CARDGWDRAVLAGYYFDYW

SEQ ID NO: 67815 - protein, 19 aa, Homo sapiens
CAKSQNSLWFGESLAFDMW

SEQ ID NO: 67816 - protein, 16 aa, Homo sapiens
CAYSSTGYYSGTLDYW

SEQ ID NO: 67817 - protein, 15 aa, Homo sapiens
CQSYDSSVTPSLYVF

SEQ ID NO: 67818 - protein, 19 aa, Homo sapiens
CARVGPAAIWYYYYYMDVW

SEQ ID NO: 67819 - protein, 24 aa, Homo sapiens
CAKERRCTSSSCSPVIRHGGFDNW

SEQ ID NO: 67820 - protein, 19 aa, Homo sapiens
CARVGGWEAAAGTGWLDYW

SEQ ID NO: 67821 - protein, 23 aa, Homo sapiens
CARDKFRGFVVVNDYYYYGMDVW

SEQ ID NO: 67822 - protein, 16 aa, Homo sapiens
CAREAVAGMEYYFDYW

SEQ ID NO: 67823 - protein, 17 aa, Homo sapiens
CAREQLVVFVVYYFDYW

SEQ ID NO: 67824 - protein, 19 aa, Homo sapiens
CATVTTIFGVVIIRAFDYW

SEQ ID NO: 67825 - protein, 26 aa, Homo sapiens
CASWDDSLSGHVVFGGGTSLSGHVVF

SEQ ID NO: 67826 - protein, 25 aa, Homo sapiens
CAREGDASPFLDRRRPHYYHYMDVW

SEQ ID NO: 67827 - protein, 17 aa, Homo sapiens
CARDFYPLRPSGYFDYW

SEQ ID NO: 67828 - protein, 16 aa, Homo sapiens
CTKWTITAAGRAFDIW

SEQ ID NO: 67829 - protein, 21 aa, Homo sapiens
CARDFTMIGVLMPPYNWFDPW

SEQ ID NO: 67830 - protein, 21 aa, Homo sapiens
CARVFSAIAVAGIPYWYFDLW

SEQ ID NO: 67831 - protein, 22 aa, Homo sapiens
CARDLPVCSSTSCYWSVVFDPW

SEQ ID NO: 67832 - protein, 20 aa, Homo sapiens
CARDLTVIDFWSGYYTFDYW

SEQ ID NO: 67833 - protein, 22 aa, Homo sapiens
CARHQRSCSSTSCKYYYYMDVW

SEQ ID NO: 67834 - protein, 20 aa, Homo sapiens
CARTSWNRESGYYYYYMDVW

SEQ ID NO: 67835 - protein, 22 aa, Homo sapiens
CARLTYYYGSGGLWTPDALDIW

SEQ ID NO: 67836 - protein, 17 aa, Homo sapiens
CAKDITPYSSSCYLDYW

SEQ ID NO: 67837 - protein, 21 aa, Homo sapiens
CARGLSHRITIFGVVTYFDYW

SEQ ID NO: 67838 - protein, 17 aa, Homo sapiens
CAKIGGGESIGWYFDQW

SEQ ID NO: 67839 - protein, 22 aa, Homo sapiens
CARDRRTLDYDFWSTSGRFDPW

SEQ ID NO: 67840 - protein, 16 aa, Homo sapiens
CARDYTTSSSGASDYW

SEQ ID NO: 67841 - protein, 20 aa, Homo sapiens
CARPALVFRGVSYPGYFDLW

SEQ ID NO: 67842 - protein, 19 aa, Homo sapiens
CAKGNYGSGFGYYYGMDVW

SEQ ID NO: 67843 - protein, 19 aa, Homo sapiens
CAKDSNYGSGSFGVVFDYW

SEQ ID NO: 67844 - protein, 18 aa, Homo sapiens
CAREVLCGDCYSDYFDYW

SEQ ID NO: 67845 - protein, 15 aa, Homo sapiens
CARGYDYNRRLFDYW

SEQ ID NO: 67846 - protein, 21 aa, Homo sapiens
CATDGGYFEGFDYYYYYMDVW

SEQ ID NO: 67847 - protein, 13 aa, Homo sapiens
CARSAPRSNFDYW

SEQ ID NO: 67848 - protein, 18 aa, Homo sapiens
CARDQIPSLTGSYYSDYW

SEQ ID NO: 67849 - protein, 17 aa, Homo sapiens
CAKDPYGAARPDYFDYW

SEQ ID NO: 67850 - protein, 23 aa, Homo sapiens
CARLSAPFYCSGGSCYPGGFDYW

SEQ ID NO: 67851 - protein, 19 aa, Homo sapiens
CARDGRVGSGDYDWYFDLW

SEQ ID NO: 67852 - protein, 17 aa, Homo sapiens
CARHNRRLLFGETIDYW

SEQ ID NO: 67853 - protein, 16 aa, Homo sapiens
CARSYYVFWTYYFDYW

SEQ ID NO: 67854 - protein, 16 aa, Homo sapiens
CASGFHSGYDSVPDYW

SEQ ID NO: 67855 - protein, 12 aa, Homo sapiens
CQQFSTYPVITF

SEQ ID NO: 67856 - protein, 13 aa, Homo sapiens
CARQDNWNYLRYW

SEQ ID NO: 67857 - protein, 18 aa, Homo sapiens
CARHLSMLGYSSHILDYW

SEQ ID NO: 67858 - protein, 21 aa, Homo sapiens
CARELSTDFWSGYSLTGPDYW

SEQ ID NO: 67859 - protein, 14 aa, Homo sapiens
CALYAIKFGWFDPW

SEQ ID NO: 67860 - protein, 14 aa, Homo sapiens
CAKDHSYSRAIDYW

SEQ ID NO: 67861 - protein, 17 aa, Homo sapiens
CARHRRDSGDPYFFDYW

SEQ ID NO: 67862 - protein, 15 aa, Homo sapiens
CARETAHSSPLFDYW

SEQ ID NO: 67863 - protein, 17 aa, Homo sapiens
CTRLVTTSYYYYYLDVW

SEQ ID NO: 67864 - protein, 16 aa, Homo sapiens
CAKPLNSNYFPLPDYW

SEQ ID NO: 67865 - protein, 14 aa, Homo sapiens
CARDDSVNGGFDYW

SEQ ID NO: 67866 - protein, 20 aa, Homo sapiens
CARDDSRTRGLTQNDAFDIW

SEQ ID NO: 67867 - protein, 14 aa, Homo sapiens
CASGSYYEFAFDIW

SEQ ID NO: 67868 - protein, 20 aa, Homo sapiens
CADTYYYDSSGYHHGAFDIW

SEQ ID NO: 67869 - protein, 15 aa, Homo sapiens
CASRTEIGLAPFDYW

SEQ ID NO: 67870 - protein, 20 aa, Homo sapiens
CAKDPLGAEDYYYYYYMDVW

SEQ ID NO: 67871 - protein, 17 aa, Homo sapiens
CARQQLTTWRGSAFDIW

SEQ ID NO: 67872 - protein, 17 aa, Homo sapiens
CATPGLPEWDLSPFDYW

SEQ ID NO: 67873 - protein, 16 aa, Homo sapiens
CASSSGWYLVGYFDYW

SEQ ID NO: 67874 - protein, 18 aa, Homo sapiens
CARDPPRGDRTMAGQDYW

SEQ ID NO: 67875 - protein, 15 aa, Homo sapiens
CARIIWYNWNQIDYW

SEQ ID NO: 67876 - protein, 15 aa, Homo sapiens
CATKAPGSPSYHFYW

SEQ ID NO: 67877 - protein, 21 aa, Homo sapiens
CAKDMKTPNYGDHRAVGFDVW

SEQ ID NO: 67878 - protein, 23 aa, Homo sapiens
CARDEYSSSSTREWYYYYGMDVW

SEQ ID NO: 67879 - protein, 21 aa, Homo sapiens
CAKESSPIVEMATIGDYFDYW

SEQ ID NO: 67880 - protein, 16 aa, Homo sapiens
CAKELIAAAGTKFDSW

SEQ ID NO: 67881 - protein, 17 aa, Homo sapiens
CARGYLIGQNYDAFDIW

SEQ ID NO: 67882 - protein, 23 aa, Homo sapiens
CAKEGRARGAALVTYVPSALDIW

SEQ ID NO: 67883 - protein, 19 aa, Homo sapiens
CARDSRSLQLWFVGAFDIW

SEQ ID NO: 67884 - protein, 16 aa, Homo sapiens
CAKEKYSSGFRYFDLW

SEQ ID NO: 67885 - protein, 18 aa, Homo sapiens
CAKDIDEGGKWANVFDSW

SEQ ID NO: 67886 - protein, 17 aa, Homo sapiens
CAREGIFGVVTANFDYW

SEQ ID NO: 67887 - protein, 15 aa, Homo sapiens
CAKDLEFDSSPIDYW

SEQ ID NO: 67888 - protein, 14 aa, Homo sapiens
CARHGFSWGYFDYW

SEQ ID NO: 67889 - protein, 19 aa, Homo sapiens
CASLGLWSRVVARGYFHPW

SEQ ID NO: 67890 - protein, 19 aa, Homo sapiens
CARSIWGYGSAKGNWFDPW

SEQ ID NO: 67891 - protein, 21 aa, Homo sapiens
CAAGAVIPATASYYYYYMDVW

SEQ ID NO: 67892 - protein, 20 aa, Homo sapiens
CASNPGDYPRGYYYYGMDVW

SEQ ID NO: 67893 - protein, 17 aa, Homo sapiens
CAREGLWAHTTKAFDIW

SEQ ID NO: 67894 - protein, 14 aa, Homo sapiens
CAKMQSFYYYMDVW

SEQ ID NO: 67895 - protein, 19 aa, Homo sapiens
CARDLYDILTGYYNAFDIW

SEQ ID NO: 67896 - protein, 18 aa, Homo sapiens
CAKSPNWSAYYRSAFDFW

SEQ ID NO: 67897 - protein, 18 aa, Homo sapiens
CATDSIRFLEWLYAFDIW

SEQ ID NO: 67898 - protein, 19 aa, Homo sapiens
CASEEEYYDFWSGHYMDVW

SEQ ID NO: 67899 - protein, 18 aa, Homo sapiens
CARVRGSGSYYRYYFDDW

SEQ ID NO: 67900 - protein, 16 aa, Homo sapiens
CVRDLYRAGLHFFDYW

SEQ ID NO: 67901 - protein, 17 aa, Homo sapiens
CAHRIIEGATVSYFEYW

SEQ ID NO: 67902 - protein, 17 aa, Homo sapiens
CARSPVGARTYWYFDVW

SEQ ID NO: 67903 - protein, 18 aa, Homo sapiens
CAREYCSGVTCYSGFGYW

SEQ ID NO: 67904 - protein, 25 aa, Homo sapiens
CARDPGDMYYYDSSGYYPHDAFDIW

SEQ ID NO: 67905 - protein, 13 aa, Homo sapiens
CAHDSTRYYFDYW

SEQ ID NO: 67906 - protein, 19 aa, Homo sapiens
CANSFVVEPTVRRGAFDFW

SEQ ID NO: 67907 - protein, 15 aa, Homo sapiens
CARGIAALLGWFDPW

SEQ ID NO: 67908 - protein, 20 aa, Homo sapiens
CVKDWAAAAGPATYWYFDLW

SEQ ID NO: 67909 - protein, 15 aa, Homo sapiens
CARGPLFTQLWFDSW

SEQ ID NO: 67910 - protein, 17 aa, Homo sapiens
CARAGYAYGLRWYFDLW

SEQ ID NO: 67911 - protein, 20 aa, Homo sapiens
CARDRLAAGRYYDSSGYDYW

SEQ ID NO: 67912 - protein, 22 aa, Homo sapiens
CAHSSYFDFWTGNNRYDAFDVW

SEQ ID NO: 67913 - protein, 14 aa, Homo sapiens
CATYYYPSRYFDYW

SEQ ID NO: 67914 - protein, 17 aa, Homo sapiens
CAKAASGRWPLYYFDWW

SEQ ID NO: 67915 - protein, 19 aa, Homo sapiens
CAKRYCSGDSCQEHVFDVW

SEQ ID NO: 67916 - protein, 16 aa, Homo sapiens
CARTATGSYYGRFDYW

SEQ ID NO: 67917 - protein, 17 aa, Homo sapiens
CATDWGVEQLVLELDYW

SEQ ID NO: 67918 - protein, 21 aa, Homo sapiens
CVRDGDCVNGICYARSAFDIW

SEQ ID NO: 67919 - protein, 16 aa, Homo sapiens
CARQLAAAGIGAFDIW

SEQ ID NO: 67920 - protein, 17 aa, Homo sapiens
CARAKPQTNYDGAFDIW

SEQ ID NO: 67921 - protein, 26 aa, Homo sapiens
CATAVEYRSSTRGVPFYYYYNGLDVW

SEQ ID NO: 67922 - protein, 21 aa, Homo sapiens
CARPYSKDVWGDYYYYGMDVW

SEQ ID NO: 67923 - protein, 24 aa, Homo sapiens
CARASRGTYYDFWSGYIHSEFDYW

SEQ ID NO: 67924 - protein, 16 aa, Homo sapiens
CARDRGGDSSLAFDPW

SEQ ID NO: 67925 - protein, 23 aa, Homo sapiens
CARAMGQLGYCSSTSCLPYFDYW

SEQ ID NO: 67926 - protein, 18 aa, Homo sapiens
CARSGGVVATRFNWFNPW

SEQ ID NO: 67927 - protein, 19 aa, Homo sapiens
CARHHANEYYHSDSPFAYW

SEQ ID NO: 67928 - protein, 24 aa, Homo sapiens
CAKSERFFGSGTSLWDYYYGMDVW

SEQ ID NO: 67929 - protein, 22 aa, Homo sapiens
CARDVVGSGWPWVYYYYGMDVW

SEQ ID NO: 67930 - protein, 17 aa, Homo sapiens
CAKAGNWNYVGNWFDSW

SEQ ID NO: 67931 - protein, 16 aa, Homo sapiens
CAREIITGTWSKFDYW

SEQ ID NO: 67932 - protein, 18 aa, Homo sapiens
CAKSPFGSSGWRYYFDYW

SEQ ID NO: 67933 - protein, 17 aa, Homo sapiens
CARDQRSHNSNDGMDVW

SEQ ID NO: 67934 - protein, 10 aa, Homo sapiens
CSAAEYFQHW

SEQ ID NO: 67935 - protein, 17 aa, Homo sapiens
CATAGGNSAPGTHLDYW

SEQ ID NO: 67936 - protein, 21 aa, Homo sapiens
CARGQGEGDFWSGLSEYFDYW

SEQ ID NO: 67937 - protein, 21 aa, Homo sapiens
CARHPLYCSSTSCYEHWFDPW

SEQ ID NO: 67938 - protein, 22 aa, Homo sapiens
CARLRVVPAAVRVYYYYGMDVW

SEQ ID NO: 67939 - protein, 16 aa, Homo sapiens
CARGVSSSWYGAFDIW

SEQ ID NO: 67940 - protein, 23 aa, Homo sapiens
CARLKGLTETEYYYDSSGSLDYW

SEQ ID NO: 67941 - protein, 17 aa, Homo sapiens
CARDLVYVPSFNAFDIW

SEQ ID NO: 67942 - protein, 21 aa, Homo sapiens
CARAPSGLRLSHYYYYYMDVW

SEQ ID NO: 67943 - protein, 14 aa, Homo sapiens
CAKEPQWLRRFDYW

SEQ ID NO: 67944 - protein, 24 aa, Homo sapiens
CARDFGGYCSSTSCYTAGGWFDPW

SEQ ID NO: 67945 - protein, 19 aa, Homo sapiens
CATHHTVSRLVLNNRFDPW

SEQ ID NO: 67946 - protein, 22 aa, Homo sapiens
CAKDLGRYCSGGSCYSGLFDYW

SEQ ID NO: 67947 - protein, 15 aa, Homo sapiens
CARLGGGNSPALDYW

SEQ ID NO: 67948 - protein, 15 aa, Homo sapiens
CAKDISPTEYFFDYW

SEQ ID NO: 67949 - protein, 15 aa, Homo sapiens
CVRPHYNFYYAMDIW

SEQ ID NO: 67950 - protein, 19 aa, Homo sapiens
CARTSYDILTGITVESDYW

SEQ ID NO: 67951 - protein, 17 aa, Homo sapiens
CARDMSYYYQNYGMDVW

SEQ ID NO: 67952 - protein, 19 aa, Homo sapiens
CAITRGDGYNYYYYGMDVW

SEQ ID NO: 67953 - protein, 17 aa, Homo sapiens
CARDRFTTIFGVAFDYW

SEQ ID NO: 67954 - protein, 15 aa, Homo sapiens
CARESWANTWYFDLW

SEQ ID NO: 67955 - protein, 19 aa, Homo sapiens
CARELRPFKTTVTTPFDSW

SEQ ID NO: 67956 - protein, 20 aa, Homo sapiens
CARDFTLSSGYNYYYGMDVW

SEQ ID NO: 67957 - protein, 17 aa, Homo sapiens
CASLAYDILTGQRPDYW

SEQ ID NO: 67958 - protein, 19 aa, Homo sapiens
CAKDVVGRSSGYYKGLDYW

SEQ ID NO: 67959 - protein, 22 aa, Homo sapiens
CATGIAVAGDYSNYYYYYMDVW

SEQ ID NO: 67960 - protein, 17 aa, Homo sapiens
CARGGPSSGWYYYFDFW

SEQ ID NO: 67961 - protein, 14 aa, Homo sapiens
CQQFNSYFPPPYTF

SEQ ID NO: 67962 - protein, 21 aa, Homo sapiens
CAKEGRYLVDHTDYFYYMDVW

SEQ ID NO: 67963 - protein, 15 aa, Homo sapiens
CARDPEVSREDGDYW

SEQ ID NO: 67964 - protein, 21 aa, Homo sapiens
CAAAPSWRWLDGPPYWYFDLW

SEQ ID NO: 67965 - protein, 19 aa, Homo sapiens
CATESITIFGVVILPFDYW

SEQ ID NO: 67966 - protein, 16 aa, Homo sapiens
CARDDGSGTPYYFDFW

SEQ ID NO: 67967 - protein, 22 aa, Homo sapiens
CARWMYDFWSGYYPQNWYFDLW

SEQ ID NO: 67968 - protein, 16 aa, Homo sapiens
CARGPLGIAPWYFDNW

SEQ ID NO: 67969 - protein, 13 aa, Homo sapiens
CAKDDRQTPFDYW

SEQ ID NO: 67970 - protein, 23 aa, Homo sapiens
CARDRSEENWQQLDYYYYYMDVW

SEQ ID NO: 67971 - protein, 13 aa, Homo sapiens
CQRYNDWPPMYIF

SEQ ID NO: 67972 - protein, 24 aa, Homo sapiens
CARDFENGDYNYGSGSYNRAFDMW

SEQ ID NO: 67973 - protein, 19 aa, Homo sapiens
CARGPYYYDRSGEYYFDYW

SEQ ID NO: 67974 - protein, 21 aa, Homo sapiens
CAREGWGRDSSGYYYAAFDIW

SEQ ID NO: 67975 - protein, 17 aa, Homo sapiens
CAHREGWQQQLLPFDWW

SEQ ID NO: 67976 - protein, 23 aa, Homo sapiens
CARDSVSRYSGSSRPYYYGMDVW

SEQ ID NO: 67977 - protein, 21 aa, Homo sapiens
CARETPPVAGTGYYYYYMDVW

SEQ ID NO: 67978 - protein, 15 aa, Homo sapiens
CARDRFYHGNEIDYW

SEQ ID NO: 67979 - protein, 25 aa, Homo sapiens
CARVLGDHDFWSGYYRYYYYYMDVW

SEQ ID NO: 67980 - protein, 19 aa, Homo sapiens
CTRHLSLWFGASARAFDIW

SEQ ID NO: 67981 - protein, 16 aa, Homo sapiens
CARGGFYDDSSVFDSW

SEQ ID NO: 67982 - protein, 24 aa, Homo sapiens
CARFYIVVAAPGLTSYYYYGMDVW

SEQ ID NO: 67983 - protein, 19 aa, Homo sapiens
CARGYDSTGYYFGNHFDQW

SEQ ID NO: 67984 - protein, 20 aa, Homo sapiens
CVRNPDIVVIDSDLHAFDIW

SEQ ID NO: 67985 - protein, 23 aa, Homo sapiens
CARANYDILTGYYFTRVFAFDIW

SEQ ID NO: 67986 - protein, 21 aa, Homo sapiens
CATEPKTYYDFWSGPANFDAW

SEQ ID NO: 67987 - protein, 20 aa, Homo sapiens
CAGGLGYTYGYGNYYAMDVW

SEQ ID NO: 67988 - protein, 25 aa, Homo sapiens
CARGSPVEQYCNGNGRCYIGAFDIW

SEQ ID NO: 67989 - protein, 19 aa, Homo sapiens
CATESDIAVAGHMYYFDYW

SEQ ID NO: 67990 - protein, 20 aa, Homo sapiens
CARVQEYYDFWSNHGAFDIW

SEQ ID NO: 67991 - protein, 13 aa, Homo sapiens
CARELTGMRLDYW

SEQ ID NO: 67992 - protein, 17 aa, Homo sapiens
CATWRQQMARYDALDIW

SEQ ID NO: 67993 - protein, 20 aa, Homo sapiens
CARSLDCSGRDCSAGAFDVW

SEQ ID NO: 67994 - protein, 13 aa, Homo sapiens
CQQYDNVLARVTF

SEQ ID NO: 67995 - protein, 16 aa, Homo sapiens
CATAYAVAGPSPPDYW

SEQ ID NO: 67996 - protein, 24 aa, Homo sapiens
CARIHRTSRPRQGQQLVTYYFDYW

SEQ ID NO: 67997 - protein, 27 aa, Homo sapiens
CARDLKRGIITIFGVVWSDYYYGMDVW

SEQ ID NO: 67998 - protein, 20 aa, Homo sapiens
CARDGDDFWSGYYVRLFDYW

SEQ ID NO: 67999 - protein, 20 aa, Homo sapiens
CAKDQQGGEYNDLWNGHDYW

SEQ ID NO: 68000 - protein, 17 aa, Homo sapiens
CARDSIAAAFNLLFDPW

SEQ ID NO: 68001 - protein, 14 aa, Homo sapiens
CARDNGGLGIFDYW

SEQ ID NO: 68002 - protein, 13 aa, Homo sapiens
CTRHTLMDHFDYW

SEQ ID NO: 68003 - protein, 19 aa, Homo sapiens
CARAGGRDGYNPSYYFDYW

SEQ ID NO: 68004 - protein, 20 aa, Homo sapiens
CARVSEYDSSGYYYAAFDIW

SEQ ID NO: 68005 - protein, 18 aa, Homo sapiens
CAKDSHEGSRRTYYFDYW

SEQ ID NO: 68006 - protein, 21 aa, Homo sapiens
CASQRRSSTGTTKMDDAFDIW

SEQ ID NO: 68007 - protein, 14 aa, Homo sapiens
CAKDMGFDRSFDSW

SEQ ID NO: 68008 - protein, 21 aa, Homo sapiens
CARDGRYCSGGSCYSMGFDYW

SEQ ID NO: 68009 - protein, 19 aa, Homo sapiens
CARLAGLVVVVPAAPFDYW

SEQ ID NO: 68010 - protein, 15 aa, Homo sapiens
CARTKESGYSNFDSW

SEQ ID NO: 68011 - protein, 16 aa, Homo sapiens
CATGMTTVTLDTFDIW

SEQ ID NO: 68012 - protein, 21 aa, Homo sapiens
CAKDHFRCPGDCYFVPGFDYW

SEQ ID NO: 68013 - protein, 22 aa, Homo sapiens
CARDARFLEYSLLPPLYYFDSW

SEQ ID NO: 68014 - protein, 17 aa, Homo sapiens
CARGGGSYPQLTWFDPW

SEQ ID NO: 68015 - protein, 17 aa, Homo sapiens
CARGGPIAVAGSVVDYW

SEQ ID NO: 68016 - protein, 15 aa, Homo sapiens
CALTVVAVAGTIDYW

SEQ ID NO: 68017 - protein, 17 aa, Homo sapiens
CAKDFWLIVVSLYFDLW

SEQ ID NO: 68018 - protein, 24 aa, Homo sapiens
CARVVIGYCSSTKINCQNNWFDPW

SEQ ID NO: 68019 - protein, 21 aa, Homo sapiens
CASDTSGTPVAKPNNDAFDIW

SEQ ID NO: 68020 - protein, 17 aa, Homo sapiens
CVRGQTVIDTNYWFDPW

SEQ ID NO: 68021 - protein, 27 aa, Homo sapiens
CARDPSIYYCGTNGCHPTPRQQYFDYW

SEQ ID NO: 68022 - protein, 18 aa, Homo sapiens
CVRSDRYCSSYKCFGDYW

SEQ ID NO: 68023 - protein, 25 aa, Homo sapiens
CARASEYTGYDFWSGYGVERWFDPW

SEQ ID NO: 68024 - protein, 17 aa, Homo sapiens
CAKDTSRLGENYAFDIW

SEQ ID NO: 68025 - protein, 19 aa, Homo sapiens
CATANYYDSSGYYFRLDYW

SEQ ID NO: 68026 - protein, 14 aa, Homo sapiens
CQVWDSNSAHSGVF

SEQ ID NO: 68027 - protein, 36 aa, Homo sapiens
CLRAEDTAMYYCARDLSRVDYGALSGYYQGGILDYW

SEQ ID NO: 68028 - protein, 19 aa, Homo sapiens
CARGGGNYYGYYYYYFDVW

SEQ ID NO: 68029 - protein, 20 aa, Homo sapiens
CAGLSTSCFYYTSESCFDYW

SEQ ID NO: 68030 - protein, 24 aa, Homo sapiens
CARMEGVRCSSTSCYTSCGYFQHW

SEQ ID NO: 68031 - protein, 18 aa, Homo sapiens
CARAGWITGAGQGAFDIW

SEQ ID NO: 68032 - protein, 18 aa, Homo sapiens
CARPGSAVFWRGESFDYW

SEQ ID NO: 68033 - protein, 20 aa, Homo sapiens
CARLGDLSVSQSGFNWFDPW

SEQ ID NO: 68034 - protein, 22 aa, Homo sapiens
CARVHDSGGNNLGALNAPFDIW

SEQ ID NO: 68035 - protein, 13 aa, Homo sapiens
CARATRWLLDDYW

SEQ ID NO: 68036 - protein, 13 aa, Homo sapiens
CMQSIQLSSEGTF

SEQ ID NO: 68037 - protein, 19 aa, Homo sapiens
CARVLFSTSSYYYYAMDVW

SEQ ID NO: 68038 - protein, 15 aa, Homo sapiens
CARDPSASHREIDYW

SEQ ID NO: 68039 - protein, 23 aa, Homo sapiens
CARDAPGEDIVVVVAAPGGWDYW

SEQ ID NO: 68040 - protein, 18 aa, Homo sapiens
CAKEESAYYDSSDGLDYW

SEQ ID NO: 68041 - protein, 17 aa, Homo sapiens
CAGWFDFWRSEDAFDIW

SEQ ID NO: 68042 - protein, 11 aa, Homo sapiens
CARYYFALDVW

SEQ ID NO: 68043 - protein, 19 aa, Homo sapiens
CASGHIGRFPYYYYGMDVW

SEQ ID NO: 68044 - protein, 31 aa, Homo sapiens
CALPISEDTALYYCAKDITKWMVTAPGFDYW

SEQ ID NO: 68045 - protein, 21 aa, Homo sapiens
CARDIVVVPAAPAPINWFDPW

SEQ ID NO: 68046 - protein, 16 aa, Homo sapiens
CAKEGGYQGPIPFDHW

SEQ ID NO: 68047 - protein, 16 aa, Homo sapiens
CARQNQLLWGDPFDYW

SEQ ID NO: 68048 - protein, 17 aa, Homo sapiens
CARGDVKYDYGDYFDYW

SEQ ID NO: 68049 - protein, 16 aa, Homo sapiens
CATDRSLAAGGIFDFW

SEQ ID NO: 68050 - protein, 14 aa, Homo sapiens
CATTDGYSRPFDYW

SEQ ID NO: 68051 - protein, 22 aa, Homo sapiens
CARASAHPYSSRIAVAGTIDYW

SEQ ID NO: 68052 - protein, 20 aa, Homo sapiens
CAGDDFWSGYYKARWAFDIW

SEQ ID NO: 68053 - protein, 16 aa, Homo sapiens
CARRPYYNYGNWFDSW

SEQ ID NO: 68054 - protein, 22 aa, Homo sapiens
CARVSFNLVLMVYVTHYYFDYW

SEQ ID NO: 68055 - protein, 18 aa, Homo sapiens
CAKDNHIAGADTTYFDYW

SEQ ID NO: 68056 - protein, 25 aa, Homo sapiens
CARQKPGHYYGSGSYPYYYYGMDVW

SEQ ID NO: 68057 - protein, 21 aa, Homo sapiens
CARGLNYDLLTDYWNNWFDPW

SEQ ID NO: 68058 - protein, 20 aa, Homo sapiens
CAKSKRLGVPTRDYYYMDVW

SEQ ID NO: 68059 - protein, 16 aa, Homo sapiens
CARDSILGTRSHFDYW

SEQ ID NO: 68060 - protein, 17 aa, Homo sapiens
CAKDLTPLGLTYYFDNW

SEQ ID NO: 68061 - protein, 22 aa, Homo sapiens
CAREGYYYDSSGSHLVYYFDYW

SEQ ID NO: 68062 - protein, 21 aa, Homo sapiens
CASAVFAYGAPTFHFYYMDVW

SEQ ID NO: 68063 - protein, 16 aa, Homo sapiens
CARGDYYETGGYCDLW

SEQ ID NO: 68064 - protein, 14 aa, Homo sapiens
CARVNSYGYGVDYW

SEQ ID NO: 68065 - protein, 17 aa, Homo sapiens
CARAINLDYSSYYFDYW

SEQ ID NO: 68066 - protein, 22 aa, Homo sapiens
CARDSTVTTSEGLYYYYGMDVW

SEQ ID NO: 68067 - protein, 22 aa, Homo sapiens
CARRRSSITIFGVVTEYYFDYW

SEQ ID NO: 68068 - protein, 17 aa, Homo sapiens
CASVVPAAKSYYYMDVW

SEQ ID NO: 68069 - protein, 15 aa, Homo sapiens
CARDLRMRSDAFDIW

SEQ ID NO: 68070 - protein, 17 aa, Homo sapiens
CARRPITIFGDPYFDLW

SEQ ID NO: 68071 - protein, 13 aa, Homo sapiens
CTTVGLSDYFDNW

SEQ ID NO: 68072 - protein, 18 aa, Homo sapiens
CAKDGAYSGRRTYAFDFW

SEQ ID NO: 68073 - protein, 15 aa, Homo sapiens
CAKSHSGAPGAFDIW

SEQ ID NO: 68074 - protein, 14 aa, Homo sapiens
CAREWVSGMTFDHW

SEQ ID NO: 68075 - protein, 15 aa, Homo sapiens
CARQRLASGWFLDYW

SEQ ID NO: 68076 - protein, 21 aa, Homo sapiens
CARVQYDVWSGNYDLYYFDYW

SEQ ID NO: 68077 - protein, 27 aa, Homo sapiens
CARDNSRIDSSGYYRYLPYYYYGMDVW

SEQ ID NO: 68078 - protein, 15 aa, Homo sapiens
CAHRRKNFSVGFDYW

SEQ ID NO: 68079 - protein, 22 aa, Homo sapiens
CARDLTTAVRGIIINEYYFDSW

SEQ ID NO: 68080 - protein, 13 aa, Homo sapiens
CAHRLVNRPFDHW

SEQ ID NO: 68081 - protein, 21 aa, Homo sapiens
CARGRRPTNMVGGVIIGFDYW

SEQ ID NO: 68082 - protein, 18 aa, Homo sapiens
CARGLWSSSWYAPYFDYW

SEQ ID NO: 68083 - protein, 14 aa, Homo sapiens
CETWDESLSAGRIF

SEQ ID NO: 68084 - protein, 23 aa, Homo sapiens
CATLTPPLAVAQRLLEWLPGDYW

SEQ ID NO: 68085 - protein, 22 aa, Homo sapiens
CAKDYSPYYYIAGSYYPLLDYW

SEQ ID NO: 68086 - protein, 15 aa, Homo sapiens
CARHRIPRGNWFDPW

SEQ ID NO: 68087 - protein, 16 aa, Homo sapiens
CARGFGDFWSGYPDYW

SEQ ID NO: 68088 - protein, 25 aa, Homo sapiens
CARGRPPPDGLRFLEWLNYPQFDYW

SEQ ID NO: 68089 - protein, 16 aa, Homo sapiens
CASALGRRSERATDYW

SEQ ID NO: 68090 - protein, 21 aa, Homo sapiens
CARGRRDSTSLFYYYYYMDVW

SEQ ID NO: 68091 - protein, 17 aa, Homo sapiens
CATDRLGDFWSGILDYW

SEQ ID NO: 68092 - protein, 17 aa, Homo sapiens
CARDSSSWYIDYYFDYW

SEQ ID NO: 68093 - protein, 17 aa, Homo sapiens
CARGGYYGSGSYYYDYW

SEQ ID NO: 68094 - protein, 19 aa, Homo sapiens
CAITARDYKIYYYYGMDVW

SEQ ID NO: 68095 - protein, 20 aa, Homo sapiens
CARVRDSSWYPPFGWYFDLW

SEQ ID NO: 68096 - protein, 17 aa, Homo sapiens
CARESLKWLVHNWFDPW

SEQ ID NO: 68097 - protein, 18 aa, Homo sapiens
CARGGFILRYFDYYMDVW

SEQ ID NO: 68098 - protein, 14 aa, Homo sapiens
CARDRGRTTVADYW

SEQ ID NO: 68099 - protein, 18 aa, Homo sapiens
CARSPRADIVVVPAADVW

SEQ ID NO: 68100 - protein, 17 aa, Homo sapiens
CCLFFAVRSRSWHFDYW

SEQ ID NO: 68101 - protein, 25 aa, Homo sapiens
CARYYKAPRLTIFGVVNYYYGMDVW

SEQ ID NO: 68102 - protein, 23 aa, Homo sapiens
CARDILVLPAAINYTPQRYFDYW

SEQ ID NO: 68103 - protein, 16 aa, Homo sapiens
CARSLAVPAKSWFDPW

SEQ ID NO: 68104 - protein, 20 aa, Homo sapiens
CAFQGHCRDTSCDSRYFDYW

SEQ ID NO: 68105 - protein, 20 aa, Homo sapiens
CARLSLEGYYYDSSGYYNYW

SEQ ID NO: 68106 - protein, 14 aa, Homo sapiens
CARPDVWFGDFGYW

SEQ ID NO: 68107 - protein, 16 aa, Homo sapiens
CAKGAHSSSLYYFEYW

SEQ ID NO: 68108 - protein, 23 aa, Homo sapiens
CARGDLIPFRWLGLTGHYYMDVW

SEQ ID NO: 68109 - protein, 19 aa, Homo sapiens
CAKDSRHILLGDEYYFDYW

SEQ ID NO: 68110 - protein, 23 aa, Homo sapiens
CARDPTVTLAAPGSNYYYGMDVW

SEQ ID NO: 68111 - protein, 18 aa, Homo sapiens
CARDSSGGGSYLGAFDIW

SEQ ID NO: 68112 - protein, 21 aa, Homo sapiens
CARSAHSGSYYRYYYYGMDVW

SEQ ID NO: 68113 - protein, 14 aa, Homo sapiens
CAKTADNGNAFDIW

SEQ ID NO: 68114 - protein, 16 aa, Homo sapiens
CTTRTIVGPHFVFDYW

SEQ ID NO: 68115 - protein, 19 aa, Homo sapiens
CARGNYDILTSYYYGMDVW

SEQ ID NO: 68116 - protein, 19 aa, Homo sapiens
CAHIKLGWNYLGPNWFDPW

SEQ ID NO: 68117 - protein, 21 aa, Homo sapiens
CARPDCSSTSCYQDEYYFDYW

SEQ ID NO: 68118 - protein, 20 aa, Homo sapiens
CAREETTPMVLYYYFGMDVW

SEQ ID NO: 68119 - protein, 24 aa, Homo sapiens
CARDGAGVVVPAAVSYYYYYMDVW

SEQ ID NO: 68120 - protein, 15 aa, Homo sapiens
CASNWDTSMVRKDYW

SEQ ID NO: 68121 - protein, 11 aa, Homo sapiens
CETWDSDTVVF

SEQ ID NO: 68122 - protein, 24 aa, Homo sapiens
CAKTKGRFEITIFGVVIEYYFDYW

SEQ ID NO: 68123 - protein, 11 aa, Homo sapiens
CTTSGDYGDYW

SEQ ID NO: 68124 - protein, 17 aa, Homo sapiens
CARVVTTHYGSGSSDYW

SEQ ID NO: 68125 - protein, 16 aa, Homo sapiens
CATGSIKGYYYGMDVW

SEQ ID NO: 68126 - protein, 20 aa, Homo sapiens
CARVRHSSSWYYPGGWFDPW

SEQ ID NO: 68127 - protein, 23 aa, Homo sapiens
CAKDIGPYDYVWGSYRYHYFDYW

SEQ ID NO: 68128 - protein, 16 aa, Homo sapiens
CVKDSGITVDWYFDYW

SEQ ID NO: 68129 - protein, 19 aa, Homo sapiens
CARRPGYCSGGSCYALDYW

SEQ ID NO: 68130 - protein, 20 aa, Homo sapiens
CARDPGSIFGVVIISYFDYW

SEQ ID NO: 68131 - protein, 11 aa, Homo sapiens
CMHGIYLPWSF

SEQ ID NO: 68132 - protein, 16 aa, Homo sapiens
CVRCGSYATVWYLDLW

SEQ ID NO: 68133 - protein, 24 aa, Homo sapiens
CATDAGLRDFWSGYSSNRDAFDIW

SEQ ID NO: 68134 - protein, 16 aa, Homo sapiens
CAKSEWLTVDGAFDTW

SEQ ID NO: 68135 - protein, 17 aa, Homo sapiens
CARVLLSTKGPYYFDYW

SEQ ID NO: 68136 - protein, 20 aa, Homo sapiens
CATTGGTTYYDILTGYYDYW

SEQ ID NO: 68137 - protein, 26 aa, Homo sapiens
CARGDGNSLRDFDWLLSGAGTVFDYW

SEQ ID NO: 68138 - protein, 23 aa, Homo sapiens
CTRDPRDSCIGGTCPNQDTFGIW

SEQ ID NO: 68139 - protein, 24 aa, Homo sapiens
CARGRIAAAGSTENYYYYYYMDVW

SEQ ID NO: 68140 - protein, 19 aa, Homo sapiens
CVREVAMVRGVILSCFDYW

SEQ ID NO: 68141 - protein, 18 aa, Homo sapiens
CARPKYLYTSSSAYFEYW

SEQ ID NO: 68142 - protein, 25 aa, Homo sapiens
CARDPPSYYYDSSGYYGLWYYFDYW

SEQ ID NO: 68143 - protein, 19 aa, Homo sapiens
CARTVTVYSSGVVGWFDPW

SEQ ID NO: 68144 - protein, 20 aa, Homo sapiens
CASLGASDPTLLDPYYFDNW

SEQ ID NO: 68145 - protein, 17 aa, Homo sapiens
CASERGATATLDAFDIW

SEQ ID NO: 68146 - protein, 13 aa, Homo sapiens
CAKDAGLLFFDSW

SEQ ID NO: 68147 - protein, 16 aa, Homo sapiens
CASLWEPDSYWYFDLW

SEQ ID NO: 68148 - protein, 19 aa, Homo sapiens
CARHSCTDGECHAYAMDVW

SEQ ID NO: 68149 - protein, 18 aa, Homo sapiens
CARDFSGSLAVAGIFDYW

SEQ ID NO: 68150 - protein, 18 aa, Homo sapiens
CAKAQIHYERSGYYFPDW

SEQ ID NO: 68151 - protein, 22 aa, Homo sapiens
CARDRSPSRGFHLGHHDAFETW

SEQ ID NO: 68152 - protein, 14 aa, Homo sapiens
CTTDVVMHTGVDYW

SEQ ID NO: 68153 - protein, 32 aa, Homo sapiens
CALPILRADDTAVYYCAKGKYGSVMIGCFDNW

SEQ ID NO: 68154 - protein, 22 aa, Homo sapiens
CARDLRASDGGGYYQADAFDIW

SEQ ID NO: 68155 - protein, 13 aa, Homo sapiens
CHLYNNWPRGFTF

SEQ ID NO: 68156 - protein, 15 aa, Homo sapiens
CAKDVSGIAVAQDVW

SEQ ID NO: 68157 - protein, 20 aa, Homo sapiens
CARDPGDFWSGYDWDYFDYW

SEQ ID NO: 68158 - protein, 19 aa, Homo sapiens
CARELRYFDWLSMCAFDIW

SEQ ID NO: 68159 - protein, 17 aa, Homo sapiens
CARAHSANYYNYYMDVW

SEQ ID NO: 68160 - protein, 27 aa, Homo sapiens
CARVFSGGLKYYDFWSGYSLECYFDYW

SEQ ID NO: 68161 - protein, 17 aa, Homo sapiens
CAKDLGRRWSDDALDIW

SEQ ID NO: 68162 - protein, 14 aa, Homo sapiens
CARVDSFGEHIDYW

SEQ ID NO: 68163 - protein, 15 aa, Homo sapiens
CTKELGEGSDAFDIW

SEQ ID NO: 68164 - protein, 20 aa, Homo sapiens
CARVEWYYYGSGSRNYFDYW

SEQ ID NO: 68165 - protein, 24 aa, Homo sapiens
CAREGSRHYDSFTGYYTPYFFDYW

SEQ ID NO: 68166 - protein, 16 aa, Homo sapiens
CASRWELPGQDAYDIW

SEQ ID NO: 68167 - protein, 18 aa, Homo sapiens
CASPVHMIVVAIDAFDIW

SEQ ID NO: 68168 - protein, 19 aa, Homo sapiens
CAKGREDEYIDTSGFIDYW

SEQ ID NO: 68169 - protein, 20 aa, Homo sapiens
CATIPLHAPYSSGQWGVDYW

SEQ ID NO: 68170 - protein, 24 aa, Homo sapiens
CAREGIVVVPAGIRHNYYYYMDVW

SEQ ID NO: 68171 - protein, 13 aa, Homo sapiens
CAGTGFNSLVDYW

SEQ ID NO: 68172 - protein, 16 aa, Homo sapiens
CARTAIAVGLPSFDYW

SEQ ID NO: 68173 - protein, 25 aa, Homo sapiens
CAKDRGGYYDSSGYPFDYYYGMDVW

SEQ ID NO: 68174 - protein, 20 aa, Homo sapiens
CARGFEPSTQYDPGYYFDIW

SEQ ID NO: 68175 - protein, 17 aa, Homo sapiens
CARRLGVMTAGNWFDPW

SEQ ID NO: 68176 - protein, 19 aa, Homo sapiens
CARTHYGSGSYYNVVLDYW

SEQ ID NO: 68177 - protein, 23 aa, Homo sapiens
CARDSRTPLNDYGNRYYYGMDVW

SEQ ID NO: 68178 - protein, 19 aa, Homo sapiens
CARDGLGGRQLALYYFHYW

SEQ ID NO: 68179 - protein, 17 aa, Homo sapiens
CARHYYDSTDNDPFDMW

SEQ ID NO: 68180 - protein, 22 aa, Homo sapiens
CAHKKGTTIFGVVIIPYSFDYW

SEQ ID NO: 68181 - protein, 19 aa, Homo sapiens
CSRDPRHSWPQYYYGMDVW

SEQ ID NO: 68182 - protein, 20 aa, Homo sapiens
CAGRKGYCPSTNCYSYFDYW

SEQ ID NO: 68183 - protein, 18 aa, Homo sapiens
CAKGRFLEWSQGDAFDLW

SEQ ID NO: 68184 - protein, 19 aa, Homo sapiens
CARGGHGLGLYLFDAFDIW

SEQ ID NO: 68185 - protein, 21 aa, Homo sapiens
CARDSGIYCSRTSCYRWSDYW

SEQ ID NO: 68186 - protein, 13 aa, Homo sapiens
CASESLTKGPDYW

SEQ ID NO: 68187 - protein, 21 aa, Homo sapiens
CTTSTYIKIIGVVSPGAFEIW

SEQ ID NO: 68188 - protein, 20 aa, Homo sapiens
CARVSSLVPAANYYYYMDVW

SEQ ID NO: 68189 - protein, 19 aa, Homo sapiens
CATGDFWSGYSHGDWFDPW

SEQ ID NO: 68190 - protein, 18 aa, Homo sapiens
CARGSKYDFWSGSYFPNW

SEQ ID NO: 68191 - protein, 19 aa, Homo sapiens
CARGGGYYYDSSGYYYPYW

SEQ ID NO: 68192 - protein, 16 aa, Homo sapiens
CAKTCSGRTCYRTDYW

SEQ ID NO: 68193 - protein, 19 aa, Homo sapiens
CAKVLRTTTYYYYYGMDIW

SEQ ID NO: 68194 - protein, 22 aa, Homo sapiens
CARVSQPLVHGLGSYRGMSDYW

SEQ ID NO: 68195 - protein, 15 aa, Homo sapiens
CVRDIDTSSYIFAYW

SEQ ID NO: 68196 - protein, 13 aa, Homo sapiens
CVRGSAANGFDSW

SEQ ID NO: 68197 - protein, 22 aa, Homo sapiens
CAREYPSHGLPPNYYYYAMDVW

SEQ ID NO: 68198 - protein, 15 aa, Homo sapiens
CARRAWGEDYDFDYW

SEQ ID NO: 68199 - protein, 19 aa, Homo sapiens
CAKDNSVGDTFGTNYFDYW

SEQ ID NO: 68200 - protein, 15 aa, Homo sapiens
CTRGGAGDYDAFDIW

SEQ ID NO: 68201 - protein, 24 aa, Homo sapiens
CARDLTVWDCSGGSCRNNDAFDIW

SEQ ID NO: 68202 - protein, 16 aa, Homo sapiens
CAKAGYSSGWSYYDYW

SEQ ID NO: 68203 - protein, 19 aa, Homo sapiens
CAKGDVGTLLSYYYYIDVW

SEQ ID NO: 68204 - protein, 14 aa, Homo sapiens
CARSYSGSSDPDYW

SEQ ID NO: 68205 - protein, 22 aa, Homo sapiens
CARHSGCSSTDCSPYYYYMDVW

SEQ ID NO: 68206 - protein, 18 aa, Homo sapiens
CARGLAIFGTVIDVFDYW

SEQ ID NO: 68207 - protein, 17 aa, Homo sapiens
CARAGRWLQSEGPFDYW

SEQ ID NO: 68208 - protein, 26 aa, Homo sapiens
CAKDQGYYDFWSGYWPPQYYYYMDVW

SEQ ID NO: 68209 - protein, 16 aa, Homo sapiens
CAKAAVSGMRGFFDYW

SEQ ID NO: 68210 - protein, 18 aa, Homo sapiens
CAGIAVAGPVDYYYMDVW

SEQ ID NO: 68211 - protein, 18 aa, Homo sapiens
CARGCSSNICRTKYNDYW

SEQ ID NO: 68212 - protein, 19 aa, Homo sapiens
CTREMRSFVGATTNQFDHW

SEQ ID NO: 68213 - protein, 18 aa, Homo sapiens
CVRLSVVVVVTDVDFDYW

SEQ ID NO: 68214 - protein, 18 aa, Homo sapiens
CARDGMGMWVTPDAFDIW

SEQ ID NO: 68215 - protein, 23 aa, Homo sapiens
CARGGRYYDTSGYYYAEYYFDYW

SEQ ID NO: 68216 - protein, 13 aa, Homo sapiens
CARMTGAAVDDYW

SEQ ID NO: 68217 - protein, 19 aa, Homo sapiens
CATDTRIFGVVISWYFDYW

SEQ ID NO: 68218 - protein, 20 aa, Homo sapiens
CATTQTIVLMVYAPPQPDYW

SEQ ID NO: 68219 - protein, 17 aa, Homo sapiens
CTTDKMYYYDSSGLDYW

SEQ ID NO: 68220 - protein, 28 aa, Homo sapiens
CGKDPKAFYYDSSDFDIHDFYFYYMDVW

SEQ ID NO: 68221 - protein, 20 aa, Homo sapiens
CAKDSRRYSSTYRDWYFDLW

SEQ ID NO: 68222 - protein, 23 aa, Homo sapiens
CATYYDFWSGPQAYYYYYGMDVW

SEQ ID NO: 68223 - protein, 16 aa, Homo sapiens
CARDPTSLPPTPYDYW

SEQ ID NO: 68224 - protein, 16 aa, Homo sapiens
CARIDVAGTAMAFDYW

SEQ ID NO: 68225 - protein, 18 aa, Homo sapiens
CASNPSSKRYYYYGMDVW

SEQ ID NO: 68226 - protein, 22 aa, Homo sapiens
CARDYLPYYYDSSDLGAAFDIW

SEQ ID NO: 68227 - protein, 18 aa, Homo sapiens
CATDREYQLLSLSYMDVW

SEQ ID NO: 68228 - protein, 24 aa, Homo sapiens
CATDCKHTWCMLPGGYYYYYMDVW

SEQ ID NO: 68229 - protein, 13 aa, Homo sapiens
CARVTPKMAKDYW

SEQ ID NO: 68230 - protein, 16 aa, Homo sapiens
CARSIKGWLANYFDYW

SEQ ID NO: 68231 - protein, 19 aa, Homo sapiens
CATPLTKGSGGIMDGFDYW

SEQ ID NO: 68232 - protein, 22 aa, Homo sapiens
CARQGHNPYCGGSNCHSHFDYW

SEQ ID NO: 68233 - protein, 13 aa, Homo sapiens
CQSYDNSYEGVIF

SEQ ID NO: 68234 - protein, 16 aa, Homo sapiens
CTHVYYYDNMDAFDIW

SEQ ID NO: 68235 - protein, 17 aa, Homo sapiens
CASATYYDPSGQGGDYW

SEQ ID NO: 68236 - protein, 19 aa, Homo sapiens
CVRHADTSTWLPPSFFDYW

SEQ ID NO: 68237 - protein, 20 aa, Homo sapiens
CARGGLHCSGRNCWSLFDHW

SEQ ID NO: 68238 - protein, 20 aa, Homo sapiens
CATYQTYYYDSSGPGPFDYW

SEQ ID NO: 68239 - protein, 18 aa, Homo sapiens
CARDPEQGFRIYTSGDYW

SEQ ID NO: 68240 - protein, 16 aa, Homo sapiens
CARYRVVVDAEYVDYW

SEQ ID NO: 68241 - protein, 19 aa, Homo sapiens
CAKRVSSSWYSLKTPFDYW

SEQ ID NO: 68242 - protein, 16 aa, Homo sapiens
CAHRLTGCGGDCFDYW

SEQ ID NO: 68243 - protein, 21 aa, Homo sapiens
CASLLKSRSSWYSYYYYMDVW

SEQ ID NO: 68244 - protein, 14 aa, Homo sapiens
CTQIRSVWSRFDYW

SEQ ID NO: 68245 - protein, 19 aa, Homo sapiens
CARELRSVDTSMGSAFDIW

SEQ ID NO: 68246 - protein, 19 aa, Homo sapiens
CAHRSFDFWTDYRECFDHW

SEQ ID NO: 68247 - protein, 21 aa, Homo sapiens
CARGIAAAEGDYYYYYGMDVW

SEQ ID NO: 68248 - protein, 23 aa, Homo sapiens
CAKNVVVVSALSSDYYYYGMDVW

SEQ ID NO: 68249 - protein, 17 aa, Homo sapiens
CARDPGRGVIMGWFDPW

SEQ ID NO: 68250 - protein, 15 aa, Homo sapiens
CAREAHYGDSSLDYW

SEQ ID NO: 68251 - protein, 26 aa, Homo sapiens
CARDVRITMVRGVIGPIYYYYGMDVW

SEQ ID NO: 68252 - protein, 18 aa, Homo sapiens
CATDSPSTSFGVAEFDPW

SEQ ID NO: 68253 - protein, 16 aa, Homo sapiens
CAKAPPDYGDYGIDYW

SEQ ID NO: 68254 - protein, 23 aa, Homo sapiens
CAGLPGPYYYDSSGYDYWYFDLW

SEQ ID NO: 68255 - protein, 18 aa, Homo sapiens
CARDFRKSGASYSAFDIW

SEQ ID NO: 68256 - protein, 17 aa, Homo sapiens
CAKGLEQWLVDYSFDYW

SEQ ID NO: 68257 - protein, 16 aa, Homo sapiens
CATQHTTIWSGAFDIW

SEQ ID NO: 68258 - protein, 15 aa, Homo sapiens
CARIRADQLLPFDYW

SEQ ID NO: 68259 - protein, 14 aa, Homo sapiens
CARDEGYYDSCDYW

SEQ ID NO: 68260 - protein, 18 aa, Homo sapiens
CARTPLSSGYATPAFDIW

SEQ ID NO: 68261 - protein, 15 aa, Homo sapiens
CAKDTGYSSGGIDYW

SEQ ID NO: 68262 - protein, 19 aa, Homo sapiens
CAILIVVVIHDHANWFDPW

SEQ ID NO: 68263 - protein, 24 aa, Homo sapiens
CARPQAVAATLIPYNGYYYGMDVW

SEQ ID NO: 68264 - protein, 18 aa, Homo sapiens
CARRANIWESHRYHFDYW

SEQ ID NO: 68265 - protein, 11 aa, Homo sapiens
CMTTVTFFDYW

SEQ ID NO: 68266 - protein, 24 aa, Homo sapiens
CARGRLEWLLSHLGGGYYYYMDVW

SEQ ID NO: 68267 - protein, 15 aa, Homo sapiens
CARCFNAYRWGIDYW

SEQ ID NO: 68268 - protein, 22 aa, Homo sapiens
CSKDPGNDFWTGYYVEYYFDYW

SEQ ID NO: 68269 - protein, 23 aa, Homo sapiens
CAHKLGGGYDSSGLWYYYGMDVW

SEQ ID NO: 68270 - protein, 22 aa, Homo sapiens
CATGYYDFWSGYYRGHNWFDPW

SEQ ID NO: 68271 - protein, 19 aa, Homo sapiens
CTRSYFDSSGSYYYFFDSW

SEQ ID NO: 68272 - protein, 22 aa, Homo sapiens
CVREGSDSGRPHTTHLNWFDPW

SEQ ID NO: 68273 - protein, 28 aa, Homo sapiens
CTRDARSMIRGVIISPPHHRASYYFDYW

SEQ ID NO: 68274 - protein, 18 aa, Homo sapiens
CARYHSSSWYSTPCFDYW

SEQ ID NO: 68275 - protein, 19 aa, Homo sapiens
CARTTVSTSVTSFRQFDYW

SEQ ID NO: 68276 - protein, 22 aa, Homo sapiens
CARDLVDYMVTGGYYYYGMDVW

SEQ ID NO: 68277 - protein, 20 aa, Homo sapiens
CARVRESSSWYRENDAFDIW

SEQ ID NO: 68278 - protein, 19 aa, Homo sapiens
CARDKAVGLRNNVGSFDIW

SEQ ID NO: 68279 - protein, 20 aa, Homo sapiens
CASAQRGPYDSSGYYYVDYW

SEQ ID NO: 68280 - protein, 22 aa, Homo sapiens
CARCLITMVRGVILPNCPFDYW

SEQ ID NO: 68281 - protein, 19 aa, Homo sapiens
CASYYYDSSGYYSPGFDPW

SEQ ID NO: 68282 - protein, 16 aa, Homo sapiens
CARDKLDSSSSPFDYW

SEQ ID NO: 68283 - protein, 18 aa, Homo sapiens
CATDLRGYSYGYWYFDLW

SEQ ID NO: 68284 - protein, 14 aa, Homo sapiens
CVRKDDGYNHFDYW

SEQ ID NO: 68285 - protein, 19 aa, Homo sapiens
CARERPRVYGSGSYYFDYW

SEQ ID NO: 68286 - protein, 25 aa, Homo sapiens
CARVGRQRSGRDYGSGSSYWYFDSW

SEQ ID NO: 68287 - protein, 22 aa, Homo sapiens
CARGSHYDTSGYRYYYYGMDVW

SEQ ID NO: 68288 - protein, 13 aa, Homo sapiens
CARTPRGSWADYW

SEQ ID NO: 68289 - protein, 31 aa, Homo sapiens
CALPICSLRPEDTAVYYCAADRSGSSDLDYW

SEQ ID NO: 68290 - protein, 21 aa, Homo sapiens
CAKVARSSSSGWPARNALDVW

SEQ ID NO: 68291 - protein, 23 aa, Homo sapiens
CARAKSGITIFGVVSYYYYMDVW

SEQ ID NO: 68292 - protein, 19 aa, Homo sapiens
CTTDRIVVVPAAHRWFDPW

SEQ ID NO: 68293 - protein, 16 aa, Homo sapiens
CASQYSSGWFYYFDYW

SEQ ID NO: 68294 - protein, 14 aa, Homo sapiens
CAAPYGSGIYFDYW

SEQ ID NO: 68295 - protein, 16 aa, Homo sapiens
CARDNGATILYYFDYW

SEQ ID NO: 68296 - protein, 20 aa, Homo sapiens
CASPPPRHLEDEYYYGMDVW

SEQ ID NO: 68297 - protein, 21 aa, Homo sapiens
CARAMPRGYSYGYPHDAFDIW

SEQ ID NO: 68298 - protein, 18 aa, Homo sapiens
CATTRVIAVAPTHWFDPW

SEQ ID NO: 68299 - protein, 14 aa, Homo sapiens
CARSPRLTSEFDSW

SEQ ID NO: 68300 - protein, 18 aa, Homo sapiens
CARDRRWSDDPHDTLDIW

SEQ ID NO: 68301 - protein, 22 aa, Homo sapiens
CAKKTDNYYYRSGYSSDAVDIW

SEQ ID NO: 68302 - protein, 24 aa, Homo sapiens
CARKSSVWYNWNDVLKPEGPFDYW

SEQ ID NO: 68303 - protein, 17 aa, Homo sapiens
CARAHTPTLPAKYFQFW

SEQ ID NO: 68304 - protein, 23 aa, Homo sapiens
CARGWKSGYYTWGYYYSYGMDVW

SEQ ID NO: 68305 - protein, 21 aa, Homo sapiens
CAGHQINTTSVDHHYYYMDVW

SEQ ID NO: 68306 - protein, 16 aa, Homo sapiens
CASPPGYSRSSGLDYW

SEQ ID NO: 68307 - protein, 22 aa, Homo sapiens
CARDGIAVAGTASYYYYGMDVW

SEQ ID NO: 68308 - protein, 22 aa, Homo sapiens
CARDKPPSKWMGAPTPNWFDPW

SEQ ID NO: 68309 - protein, 14 aa, Homo sapiens
CQAADSTGAYQEVF

SEQ ID NO: 68310 - protein, 18 aa, Homo sapiens
CAREARYSSSWHHLFDYW

SEQ ID NO: 68311 - protein, 17 aa, Homo sapiens
CAKLPNEDYYYYGMDVW

SEQ ID NO: 68312 - protein, 22 aa, Homo sapiens
CARGGYYYDSSGYYYRPYFDYW

SEQ ID NO: 68313 - protein, 25 aa, Homo sapiens
CTKERYCSSVSCYRGYYHFYGMDVW

SEQ ID NO: 68314 - protein, 18 aa, Homo sapiens
CVRSPEYIGFLEYYMDVW

SEQ ID NO: 68315 - protein, 20 aa, Homo sapiens
CAKDMVTAFGVVITSAFDLW

SEQ ID NO: 68316 - protein, 17 aa, Homo sapiens
CARERWLESASPIFDYW

SEQ ID NO: 68317 - protein, 24 aa, Homo sapiens
CARAGYSSGGAYNKNYYYYGMDVW

SEQ ID NO: 68318 - protein, 17 aa, Homo sapiens
CARDPAAAAGYWYFDLW

SEQ ID NO: 68319 - protein, 19 aa, Homo sapiens
CARVSSGVVIIYYYYMDVW

SEQ ID NO: 68320 - protein, 20 aa, Homo sapiens
CATDGAYYTRSTSYTRGDYW

SEQ ID NO: 68321 - protein, 25 aa, Homo sapiens
CAREGLGVVVAATSYYYYYYGMDVW

SEQ ID NO: 68322 - protein, 25 aa, Homo sapiens
CARHRLHTIFGVVIIGSQYNWFDPW

SEQ ID NO: 68323 - protein, 15 aa, Homo sapiens
CAKEDRNYISLFEYW

SEQ ID NO: 68324 - protein, 19 aa, Homo sapiens
CARDGPDDYGDLVGWFDPW

SEQ ID NO: 68325 - protein, 27 aa, Homo sapiens
CARVKPANREITIFGVVLSRPNWFDPW

SEQ ID NO: 68326 - protein, 19 aa, Homo sapiens
CAAMGAKGDYYYYYYMDVW

SEQ ID NO: 68327 - protein, 20 aa, Homo sapiens
CGRTVFGVDASAYYHYMDVW

SEQ ID NO: 68328 - protein, 17 aa, Homo sapiens
CARNRAVTGILGGHDYW

SEQ ID NO: 68329 - protein, 19 aa, Homo sapiens
CAKDRYSGYDLFVDAFDIW

SEQ ID NO: 68330 - protein, 14 aa, Homo sapiens
CASLGWGSWYFDYW

SEQ ID NO: 68331 - protein, 15 aa, Homo sapiens
CARIRADYGPLEDYW

SEQ ID NO: 68332 - protein, 19 aa, Homo sapiens
CARGRWLQLTDPSWYFDLW

SEQ ID NO: 68333 - protein, 24 aa, Homo sapiens
CAHWGRAVAATDGYYYYYYYMDVW

SEQ ID NO: 68334 - protein, 20 aa, Homo sapiens
CASNGWGYYDSSLPGTFDYW

SEQ ID NO: 68335 - protein, 15 aa, Homo sapiens
CATPGIDGSGSYDYW

SEQ ID NO: 68336 - protein, 24 aa, Homo sapiens
CARLISGLIVVVPAAIEHNWFDPW

SEQ ID NO: 68337 - protein, 13 aa, Homo sapiens
CGRGNGTYFGDYW

SEQ ID NO: 68338 - protein, 19 aa, Homo sapiens
CTTLRGYCSGGSCYSIDYW

SEQ ID NO: 68339 - protein, 21 aa, Homo sapiens
CARVVASYYYDSSGYQPPDYW

SEQ ID NO: 68340 - protein, 21 aa, Homo sapiens
CAKDRGTIFGVVITGNWFDPW

SEQ ID NO: 68341 - protein, 25 aa, Homo sapiens
CARRNGHRVVNYDFTPTYYYGMDVW

SEQ ID NO: 68342 - protein, 16 aa, Homo sapiens
CAASWQQLVHGSLDYW

SEQ ID NO: 68343 - protein, 20 aa, Homo sapiens
CARDIKLFQGHYYYYGMDVW

SEQ ID NO: 68344 - protein, 22 aa, Homo sapiens
CARVDNMGDYAPLYYYYGMDVW

SEQ ID NO: 68345 - protein, 23 aa, Homo sapiens
CARDSPLLRFLGGARYYYGMDVW

SEQ ID NO: 68346 - protein, 18 aa, Homo sapiens
CAKVFSTHYYYYYGMDVW

SEQ ID NO: 68347 - protein, 29 aa, Homo sapiens
CARHRGGRYCSSTSCYEGKNYYYYGMDVW

SEQ ID NO: 68348 - protein, 13 aa, Homo sapiens
CTTIPLWESFPYW

SEQ ID NO: 68349 - protein, 16 aa, Homo sapiens
CARDIGGTTLTAFDYW

SEQ ID NO: 68350 - protein, 22 aa, Homo sapiens
CAKVTGPYYYDSSGYYSHFDYW

SEQ ID NO: 68351 - protein, 20 aa, Homo sapiens
CAKRSYYDFWSGYYPFFDSW

SEQ ID NO: 68352 - protein, 19 aa, Homo sapiens
CAKDPEGGSSWHAEFFQHW

SEQ ID NO: 68353 - protein, 22 aa, Homo sapiens
CVRGGGTEWLKMDYPNDAFDNW

SEQ ID NO: 68354 - protein, 18 aa, Homo sapiens
CATLRRLRGLQFGTRDYW

SEQ ID NO: 68355 - protein, 23 aa, Homo sapiens
CVRGAHTVFGVIIIGRIDVFDIW

SEQ ID NO: 68356 - protein, 13 aa, Homo sapiens
CQSADNGGIPVVF

SEQ ID NO: 68357 - protein, 17 aa, Homo sapiens
CARDAAAAAIQKAFDIW

SEQ ID NO: 68358 - protein, 22 aa, Homo sapiens
CAKDTGYDFWSGYYNEGYFDYW

SEQ ID NO: 68359 - protein, 16 aa, Homo sapiens
CARVYGGYYSYSFDYW

SEQ ID NO: 68360 - protein, 19 aa, Homo sapiens
CATDPFVGRVAGHNWFDPW

SEQ ID NO: 68361 - protein, 15 aa, Homo sapiens
CARVAGSSRGFFDSW

SEQ ID NO: 68362 - protein, 13 aa, Homo sapiens
CAKDDYLNGFDIW

SEQ ID NO: 68363 - protein, 20 aa, Homo sapiens
CARSIMMFEVVASRYYFDYW

SEQ ID NO: 68364 - protein, 17 aa, Homo sapiens
CASHYGDYVFSMAFDIW

SEQ ID NO: 68365 - protein, 15 aa, Homo sapiens
CARHCSSIDCYNDYW

SEQ ID NO: 68366 - protein, 23 aa, Homo sapiens
CAKDLSFYESGGYFADDDAFDIW

SEQ ID NO: 68367 - protein, 18 aa, Homo sapiens
CARFSVSGSYGSHAFDIW

SEQ ID NO: 68368 - protein, 16 aa, Homo sapiens
CAHDGSYRFTYYFTSW

SEQ ID NO: 68369 - protein, 15 aa, Homo sapiens
CCSRDSSGDHPHVVF

SEQ ID NO: 68370 - protein, 19 aa, Homo sapiens
CAKDKSSGGGWFETNFDSW

SEQ ID NO: 68371 - protein, 24 aa, Homo sapiens
CARDSLTLATTDQEYYYYYGMDVW

SEQ ID NO: 68372 - protein, 28 aa, Homo sapiens
CARDSGVTNSGWYVPNEEYYYYYGMDVW

SEQ ID NO: 68373 - protein, 16 aa, Homo sapiens
CAKGDYYSGWYHLDYW

SEQ ID NO: 68374 - protein, 15 aa, Homo sapiens
CARMGVRWDEAFDIW

SEQ ID NO: 68375 - protein, 23 aa, Homo sapiens
CARDPPYPLYGDYVLYYYGMDVW

SEQ ID NO: 68376 - protein, 19 aa, Homo sapiens
CARDRYSSGWYRDYAFDIW

SEQ ID NO: 68377 - protein, 16 aa, Homo sapiens
CGRDHASRGDPVVDYW

SEQ ID NO: 68378 - protein, 23 aa, Homo sapiens
CARVPTSTTVPATNYYYYSMDVW

SEQ ID NO: 68379 - protein, 15 aa, Homo sapiens
CATGSPFTVGWFDPW

SEQ ID NO: 68380 - protein, 16 aa, Homo sapiens
CARTTYGDQTWYFDSW

SEQ ID NO: 68381 - protein, 19 aa, Homo sapiens
CATVPYYFANNGRGGFDYW

SEQ ID NO: 68382 - protein, 15 aa, Homo sapiens
CPTPMNTNSFQFDYW

SEQ ID NO: 68383 - protein, 13 aa, Homo sapiens
CATMGMFRKFDVW

SEQ ID NO: 68384 - protein, 24 aa, Homo sapiens
CARDSEPDDSSGYYCSGGCYFDYW

SEQ ID NO: 68385 - protein, 15 aa, Homo sapiens
CATARLDIITLFNYW

SEQ ID NO: 68386 - protein, 16 aa, Homo sapiens
CARRPRVVKGEAFDYW

SEQ ID NO: 68387 - protein, 21 aa, Homo sapiens
CATVRTVTTLGDYYYYGMDVW

SEQ ID NO: 68388 - protein, 19 aa, Homo sapiens
CATSTVFWSGQPPFWFDPW

SEQ ID NO: 68389 - protein, 16 aa, Homo sapiens
CYSTDSSGNHSWDVVF

SEQ ID NO: 68390 - protein, 14 aa, Homo sapiens
CTTGDFWSTSFDYW

SEQ ID NO: 68391 - protein, 18 aa, Homo sapiens
CTRVNLIGDDYGYYFDYW

SEQ ID NO: 68392 - protein, 14 aa, Homo sapiens
CSRDLMGFDAFDVW

SEQ ID NO: 68393 - protein, 22 aa, Homo sapiens
CAREGYYGSGSQLYYSYGMDVW

SEQ ID NO: 68394 - protein, 17 aa, Homo sapiens
CARLQQRLVSTDAFDIW

SEQ ID NO: 68395 - protein, 13 aa, Homo sapiens
CATPRKLGPFDYW

SEQ ID NO: 68396 - protein, 16 aa, Homo sapiens
CASAGQFSSSDAFDIW

SEQ ID NO: 68397 - protein, 21 aa, Homo sapiens
CARDNVKASVAGGVFAPFDYW

SEQ ID NO: 68398 - protein, 17 aa, Homo sapiens
CVGRPRDGLIYGPFDFW

SEQ ID NO: 68399 - protein, 19 aa, Homo sapiens
CARGGTMVVVVPTTYFDYW

SEQ ID NO: 68400 - protein, 23 aa, Homo sapiens
CARHRRDGYNSPRVYYYYGMDVW

SEQ ID NO: 68401 - protein, 15 aa, Homo sapiens
CATPPVDTGLIFDSW

SEQ ID NO: 68402 - protein, 23 aa, Homo sapiens
CARQSLFDSGGYYYSTGAAFDLW

SEQ ID NO: 68403 - protein, 22 aa, Homo sapiens
CARVWGYYDSGGYWRNDAFDIW

SEQ ID NO: 68404 - protein, 17 aa, Homo sapiens
CARDDIVAAGTQYMDVW

SEQ ID NO: 68405 - protein, 18 aa, Homo sapiens
CAREVIIVTTDSDAFDVW

SEQ ID NO: 68406 - protein, 18 aa, Homo sapiens
CALASPRDVMIVDYLDYW

SEQ ID NO: 68407 - protein, 16 aa, Homo sapiens
CATERFRRLQGVFDYW

SEQ ID NO: 68408 - protein, 20 aa, Homo sapiens
CARMGSSGYYRLTYDAFDIW

SEQ ID NO: 68409 - protein, 17 aa, Homo sapiens
CALNYYDTSGLTTGDYW

SEQ ID NO: 68410 - protein, 16 aa, Homo sapiens
CTTTGFSSSSYWFESW

SEQ ID NO: 68411 - protein, 15 aa, Homo sapiens
CASSGGGYFDGFDYW

SEQ ID NO: 68412 - protein, 18 aa, Homo sapiens
CARRLRDGGNFPPFFDYW

SEQ ID NO: 68413 - protein, 22 aa, Homo sapiens
CARDGGSYYSPVHYYYYGMDVW

SEQ ID NO: 68414 - protein, 16 aa, Homo sapiens
CAKDKWTTMRSAFDIW

SEQ ID NO: 68415 - protein, 20 aa, Homo sapiens
CARGIPSGIFGVATEGFDYW

SEQ ID NO: 68416 - protein, 12 aa, Homo sapiens
CAMMLRGYMDVW

SEQ ID NO: 68417 - protein, 16 aa, Homo sapiens
CARDGDGYNSVHFDYW

SEQ ID NO: 68418 - protein, 14 aa, Homo sapiens
CARMSPWVVGFDYW

SEQ ID NO: 68419 - protein, 18 aa, Homo sapiens
CAKDISPITMILSYFDYW

SEQ ID NO: 68420 - protein, 15 aa, Homo sapiens
CARRISGGAYHFDYW

SEQ ID NO: 68421 - protein, 15 aa, Homo sapiens
CARAYSATGPYLDYW

SEQ ID NO: 68422 - protein, 27 aa, Homo sapiens
CARVPPIGYCSSTSCYRFLSKGWFDPW

SEQ ID NO: 68423 - protein, 15 aa, Homo sapiens
CAQTRGAYGDYFDAW

SEQ ID NO: 68424 - protein, 21 aa, Homo sapiens
CARWPEAAAGTHYYYYYMDVW

SEQ ID NO: 68425 - protein, 12 aa, Homo sapiens
CAKELGRRSDYW

SEQ ID NO: 68426 - protein, 20 aa, Homo sapiens
CARGGDFDFWISQLYFFDSW

SEQ ID NO: 68427 - protein, 24 aa, Homo sapiens
CVRDPSLSSVMVYAIYTSDAFDVW

SEQ ID NO: 68428 - protein, 24 aa, Homo sapiens
CARGEGFCTGADCLEYFYYGMDVW

SEQ ID NO: 68429 - protein, 21 aa, Homo sapiens
CAHSRPRREYSYYSDYYFDYW

SEQ ID NO: 68430 - protein, 21 aa, Homo sapiens
CARLSEPVHYGDYYYYGMDVW

SEQ ID NO: 68431 - protein, 23 aa, Homo sapiens
CARVSLLPTGPRTEARAAAIDYW

SEQ ID NO: 68432 - protein, 19 aa, Homo sapiens
CETLYYDFRTNYYTHFDYW

SEQ ID NO: 68433 - protein, 18 aa, Homo sapiens
CARPAYCSSVSCSHFDSW

SEQ ID NO: 68434 - protein, 25 aa, Homo sapiens
CAREPAYCAEGVCYLPGALGRFDNW

SEQ ID NO: 68435 - protein, 13 aa, Homo sapiens
CVKRHDNWRDDYW

SEQ ID NO: 68436 - protein, 22 aa, Homo sapiens
CARRPAGYSSSWYYYYYGMDVW

SEQ ID NO: 68437 - protein, 21 aa, Homo sapiens
CATESITIFGVVIKDRAFDIW

SEQ ID NO: 68438 - protein, 13 aa, Homo sapiens
CARDQRGDTMDVW

SEQ ID NO: 68439 - protein, 22 aa, Homo sapiens
CARVQAVAGTGAYQYYYGMDVW

SEQ ID NO: 68440 - protein, 16 aa, Homo sapiens
CARLTRSSSENFFDYW

SEQ ID NO: 68441 - protein, 18 aa, Homo sapiens
CARDDGYYYDRSGYYDYW

SEQ ID NO: 68442 - protein, 18 aa, Homo sapiens
CAKVGAAAGLSYRAFDIW

SEQ ID NO: 68443 - protein, 23 aa, Homo sapiens
CARDRNFYDSTADYPWSDALDVW

SEQ ID NO: 68444 - protein, 17 aa, Homo sapiens
CARGRYSYGYGWYFDLW

SEQ ID NO: 68445 - protein, 19 aa, Homo sapiens
CATDRSGTIGIREDVFDIW

SEQ ID NO: 68446 - protein, 20 aa, Homo sapiens
CAREQRVFSQQGYYYYMDVW

SEQ ID NO: 68447 - protein, 22 aa, Homo sapiens
CARETRTDSSAYYWVYWYFDLW

SEQ ID NO: 68448 - protein, 17 aa, Homo sapiens
CARMGAIQQLAGYFDYW

SEQ ID NO: 68449 - protein, 22 aa, Homo sapiens
CAGVQGYASGTYFSYYYALDVW

SEQ ID NO: 68450 - protein, 16 aa, Homo sapiens
CAREDSSGPFDSFGVW

SEQ ID NO: 68451 - protein, 17 aa, Homo sapiens
CARAPHSSGYYYYFDYW

SEQ ID NO: 68452 - protein, 17 aa, Homo sapiens
CARDLDWGSEGDYFDYW

SEQ ID NO: 68453 - protein, 17 aa, Homo sapiens
CATPRTPYYDITNFDYW

SEQ ID NO: 68454 - protein, 17 aa, Homo sapiens
CARWGRVIYATGSFDYW

SEQ ID NO: 68455 - protein, 15 aa, Homo sapiens
CARKNAVDSGAMDYW

SEQ ID NO: 68456 - protein, 18 aa, Homo sapiens
CARARYSGSPRANWFDPW

SEQ ID NO: 68457 - protein, 24 aa, Homo sapiens
CARAGGRDYDILTGYYPYYYMDVW

SEQ ID NO: 68458 - protein, 20 aa, Homo sapiens
CATGRVLWFGELLNSWFDPW

SEQ ID NO: 68459 - protein, 20 aa, Homo sapiens
CARVSWTNIRTFQYYYMDVW

SEQ ID NO: 68460 - protein, 15 aa, Homo sapiens
CASSGYSSSWPSDYW

SEQ ID NO: 68461 - protein, 20 aa, Homo sapiens
CATSSIYDFWSGSSPPFHYW

SEQ ID NO: 68462 - protein, 19 aa, Homo sapiens
CVKDSESSGYSHSSWFDLW

SEQ ID NO: 68463 - protein, 24 aa, Homo sapiens
CAKDLEYCSSTSCLGYYYYGMDVW

SEQ ID NO: 68464 - protein, 20 aa, Homo sapiens
CARWVTDTDPSYYYYGMDVW

SEQ ID NO: 68465 - protein, 21 aa, Homo sapiens
CARQPYRSTIWSRQADYFDFW

SEQ ID NO: 68466 - protein, 22 aa, Homo sapiens
CARGYCGGDCYPLSGSDAFDIW

SEQ ID NO: 68467 - protein, 25 aa, Homo sapiens
CARDLREVTTVTTLRIYYYYGMDVW

SEQ ID NO: 68468 - protein, 16 aa, Homo sapiens
CARGTEVVISGIVDYW

SEQ ID NO: 68469 - protein, 22 aa, Homo sapiens
CARASGIYIAALASYYYGMDVW

SEQ ID NO: 68470 - protein, 17 aa, Homo sapiens
CAKRVVVTATSYYFDYW

SEQ ID NO: 68471 - protein, 20 aa, Homo sapiens
CARKAPSLVPAAADDAFDIW

SEQ ID NO: 68472 - protein, 24 aa, Homo sapiens
CARVFPQRYYGSGSYYREDYFDYW

SEQ ID NO: 68473 - protein, 21 aa, Homo sapiens
CAKEGNRNLASAGIGLYFDYW

SEQ ID NO: 68474 - protein, 18 aa, Homo sapiens
CARALTIGDSSSWLFDPW

SEQ ID NO: 68475 - protein, 20 aa, Homo sapiens
CVKDMGHGSSAPLYGALDIW

SEQ ID NO: 68476 - protein, 17 aa, Homo sapiens
CARFRFLGDIGYAFDSW

SEQ ID NO: 68477 - protein, 23 aa, Homo sapiens
CATDRGSVWGYCSGGSCGAFDIW

SEQ ID NO: 68478 - protein, 22 aa, Homo sapiens
CTTDLNIELRFLEWQDDAFDIW

SEQ ID NO: 68479 - protein, 19 aa, Homo sapiens
CARVRGVVAGYVQYYFDYW

SEQ ID NO: 68480 - protein, 16 aa, Homo sapiens
CAREAWGGTHRPFDLW

SEQ ID NO: 68481 - protein, 14 aa, Homo sapiens
CANFARNNWYFDLW

SEQ ID NO: 68482 - protein, 20 aa, Homo sapiens
CARVYLYCSSTSCSDAFDIW

SEQ ID NO: 68483 - protein, 15 aa, Homo sapiens
CAREPLSRRDGLDVW

SEQ ID NO: 68484 - protein, 20 aa, Homo sapiens
CAKDIGWSGSDDGFGGSDYW

SEQ ID NO: 68485 - protein, 16 aa, Homo sapiens
CARDFYSKGSAPRDYW

SEQ ID NO: 68486 - protein, 21 aa, Homo sapiens
CARPHYYGSGIYFMDWYFDLW

SEQ ID NO: 68487 - protein, 21 aa, Homo sapiens
CARGWGRLRFPAADQYYFDYW

SEQ ID NO: 68488 - protein, 14 aa, Homo sapiens
CAREGQSLAGFDIW

SEQ ID NO: 68489 - protein, 15 aa, Homo sapiens
CTRRSWAGSAPCDYW

SEQ ID NO: 68490 - protein, 20 aa, Homo sapiens
CAGDRGIGHWLVLNNCFDPW

SEQ ID NO: 68491 - protein, 18 aa, Homo sapiens
CAKDKETGYDWYYYMDVW

SEQ ID NO: 68492 - protein, 24 aa, Homo sapiens
CAKFSGLSGSGSYYKYYYYGMDVW

SEQ ID NO: 68493 - protein, 18 aa, Homo sapiens
CAHELLLWFGEAPYFDYW

SEQ ID NO: 68494 - protein, 20 aa, Homo sapiens
CARDWWGPIAVAGTYPIDYW

SEQ ID NO: 68495 - protein, 13 aa, Homo sapiens
CQQSYTNPRVYTF

SEQ ID NO: 68496 - protein, 25 aa, Homo sapiens
CAKDHRTYYDSSGYPLLYYYGMDVW

SEQ ID NO: 68497 - protein, 22 aa, Homo sapiens
CARGGKMEWLKMINPTDAFDIW

SEQ ID NO: 68498 - protein, 24 aa, Homo sapiens
CARYPLFPEIITIFGVVIRAFDIW

SEQ ID NO: 68499 - protein, 19 aa, Homo sapiens
CARATYYYDSSGYYPFDYW

SEQ ID NO: 68500 - protein, 15 aa, Homo sapiens
CARAAFISGWYMDYW

SEQ ID NO: 68501 - protein, 21 aa, Homo sapiens
CARTNHVANGDYAYYYYMDVW

SEQ ID NO: 68502 - protein, 21 aa, Homo sapiens
CASGPATIFGVVISYWYFDLW

SEQ ID NO: 68503 - protein, 17 aa, Homo sapiens
CARDIVAVALWGNFDHW

SEQ ID NO: 68504 - protein, 21 aa, Homo sapiens
CASYYYDSSGPPDYYYGMDVW

SEQ ID NO: 68505 - protein, 14 aa, Homo sapiens
CSSYTSGNTLNWVF

SEQ ID NO: 68506 - protein, 20 aa, Homo sapiens
CAKAFDSSAYYNDYWYFDLW

SEQ ID NO: 68507 - protein, 19 aa, Homo sapiens
CARDKYPYVWTLHNWFDPW

SEQ ID NO: 68508 - protein, 16 aa, Homo sapiens
CARVRIQLWMYYFDYW

SEQ ID NO: 68509 - protein, 15 aa, Homo sapiens
CASTLDPPAEYFQHW

SEQ ID NO: 68510 - protein, 17 aa, Homo sapiens
CATYHYDRYGETSFDYW

SEQ ID NO: 68511 - protein, 17 aa, Homo sapiens
CARDLALQGRPYYFDHW

SEQ ID NO: 68512 - protein, 17 aa, Homo sapiens
CARDRSITIFAGSHDYW

SEQ ID NO: 68513 - protein, 11 aa, Homo sapiens
CQQYGRSIVVF

SEQ ID NO: 68514 - protein, 17 aa, Homo sapiens
CAKTTVLTRDSWYFDLW

SEQ ID NO: 68515 - protein, 18 aa, Homo sapiens
CARDKDEWGLWEGYFDYW

SEQ ID NO: 68516 - protein, 23 aa, Homo sapiens
CTTGETDGDYDEGYYYYYGMDVW

SEQ ID NO: 68517 - protein, 24 aa, Homo sapiens
CAKWFVGSSSSGSHYYYYYYMDVW

SEQ ID NO: 68518 - protein, 21 aa, Homo sapiens
CARHSRFYIRPYGDINWFDPW

SEQ ID NO: 68519 - protein, 20 aa, Homo sapiens
CATHRDYDYWAGYYGWFDTW

SEQ ID NO: 68520 - protein, 18 aa, Homo sapiens
CARGGYSSGRILNWFDPW

SEQ ID NO: 68521 - protein, 24 aa, Homo sapiens
CARHIRGGYDSSGYYSYYYGMDVW

SEQ ID NO: 68522 - protein, 22 aa, Homo sapiens
CARDLEEVGSSVSGYYYGMDVW

SEQ ID NO: 68523 - protein, 16 aa, Homo sapiens
CVKDRSPSSSRGFDIW

SEQ ID NO: 68524 - protein, 19 aa, Homo sapiens
CARVVGDYYDRSGTYFDYW

SEQ ID NO: 68525 - protein, 20 aa, Homo sapiens
CARGYDSSIYYYVAEDFQHW

SEQ ID NO: 68526 - protein, 15 aa, Homo sapiens
CASHHPEPFFTYDYW

SEQ ID NO: 68527 - protein, 21 aa, Homo sapiens
CALPISAVYYCARDKDAFDVW

SEQ ID NO: 68528 - protein, 13 aa, Homo sapiens
CATGPPGDGFDIW

SEQ ID NO: 68529 - protein, 18 aa, Homo sapiens
CAKSGALVVRGISYFDSW

SEQ ID NO: 68530 - protein, 12 aa, Homo sapiens [sequence omitted]

SEQ ID NO: 68531 - protein, 23 aa, Homo sapiens
CARQGITFGGVIVIGRPSWFDPW

SEQ ID NO: 68532 - protein, 16 aa, Homo sapiens
CATGGRKTSLTTFEYW

SEQ ID NO: 68533 - protein, 18 aa, Homo sapiens
CAKDCAAAGRVPYYFDYW

SEQ ID NO: 68534 - protein, 18 aa, Homo sapiens
CARATVSTRRAPGAYDIW

SEQ ID NO: 68535 - protein, 18 aa, Homo sapiens
CARSGVRFLEWLSPFDYW

SEQ ID NO: 68536 - protein, 25 aa, Homo sapiens
CATTALPRHYDFWSGYLPYWYFDLW

SEQ ID NO: 68537 - protein, 19 aa, Homo sapiens
CAKAPRGLDIVATTYFDYW

SEQ ID NO: 68538 - protein, 19 aa, Homo sapiens
CARAFVLGELFRAWYMDVW

SEQ ID NO: 68539 - protein, 18 aa, Homo sapiens
CARLPGIASDGVYYMDVW

SEQ ID NO: 68540 - protein, 20 aa, Homo sapiens
CARVTAAYCDFSSCRYTDYW

SEQ ID NO: 68541 - protein, 15 aa, Homo sapiens
CTSNDFWSGYYFDPW

SEQ ID NO: 68542 - protein, 21 aa, Homo sapiens
CARHLSTLRFLEWFLGYFDYW

SEQ ID NO: 68543 - protein, 22 aa, Homo sapiens
CARGDIPGFSRQGNRVWYFDLW

SEQ ID NO: 68544 - protein, 21 aa, Homo sapiens
CARVPADPAAITYVYWYFDLW

SEQ ID NO: 68545 - protein, 19 aa, Homo sapiens
CARDGVIVVAPTSDAFNMW

SEQ ID NO: 68546 - protein, 15 aa, Homo sapiens
CQSTDSSDNSNSVVF

SEQ ID NO: 68547 - protein, 16 aa, Homo sapiens
CATWGYTETYFAFDNW

SEQ ID NO: 68548 - protein, 21 aa, Homo sapiens
CARTPLNYDSSGYYYDPFDYW

SEQ ID NO: 68549 - protein, 23 aa, Homo sapiens
CARRTGYYGSGTYAEYLNWFDPW

SEQ ID NO: 68550 - protein, 23 aa, Homo sapiens
CARDRVLRFLEWAPYYYYGMDVW

SEQ ID NO: 68551 - protein, 22 aa, Homo sapiens
CATHRGYCGTTSCYTPGPFDYW

SEQ ID NO: 68552 - protein, 19 aa, Homo sapiens
CARLDNYNSRLYQYYFDYW

SEQ ID NO: 68553 - protein, 21 aa, Homo sapiens
CARRPIMITFGGAPIPHFDYW

SEQ ID NO: 68554 - protein, 17 aa, Homo sapiens
CAKDATRYTNSWHFDYW

SEQ ID NO: 68555 - protein, 19 aa, Homo sapiens
CAREKPKGRRFGELFFDYW

SEQ ID NO: 68556 - protein, 17 aa, Homo sapiens
CSDLTAAEVGQDAFDIW

SEQ ID NO: 68557 - protein, 19 aa, Homo sapiens
CARSSYYYDSTRGPAFDIW

SEQ ID NO: 68558 - protein, 16 aa, Homo sapiens
CARASVTINKPGFDYW

SEQ ID NO: 68559 - protein, 17 aa, Homo sapiens
CAKGAWYYDSSGYYVYW

SEQ ID NO: 68560 - protein, 14 aa, Homo sapiens
CYSTDSTDNHDWVF

SEQ ID NO: 68561 - protein, 14 aa, Homo sapiens
CAHSRQTWFPFDIW

SEQ ID NO: 68562 - protein, 20 aa, Homo sapiens
CVRDRYETRGYYYHDAFDIW

SEQ ID NO: 68563 - protein, 19 aa, Homo sapiens
CARRGSVLNTSSWYYFDYW

SEQ ID NO: 68564 - protein, 18 aa, Homo sapiens
CARDRYDSSGYYWAVDYW

SEQ ID NO: 68565 - protein, 14 aa, Homo sapiens
CARELQRGRAFDFW

SEQ ID NO: 68566 - protein, 17 aa, Homo sapiens
CACHAPSWGGMRDFDYW

SEQ ID NO: 68567 - protein, 22 aa, Homo sapiens
CARRPSPRYCSSTSCYRGFDYW

SEQ ID NO: 68568 - protein, 21 aa, Homo sapiens
CARLHDFWSGQSYYQYGMDVW

SEQ ID NO: 68569 - protein, 22 aa, Homo sapiens
CAILPLTQDFWSGFQTYYFDYW

SEQ ID NO: 68570 - protein, 20 aa, Homo sapiens
CARNPGGYSSTWSPDRFDFW

SEQ ID NO: 68571 - protein, 14 aa, Homo sapiens
CARRVVISYYYDSW

SEQ ID NO: 68572 - protein, 18 aa, Homo sapiens
CAKDADSVLLMGYYFDYW

SEQ ID NO: 68573 - protein, 17 aa, Homo sapiens
CAAARLSGYDFNWFDPW

SEQ ID NO: 68574 - protein, 16 aa, Homo sapiens
CAKAFRLRGTNHFDYW

SEQ ID NO: 68575 - protein, 17 aa, Homo sapiens
CASGYCTRTRCRGFDYW

SEQ ID NO: 68576 - protein, 20 aa, Homo sapiens
CTTDRYYDYVWGSYTLFDYW

SEQ ID NO: 68577 - protein, 19 aa, Homo sapiens
CARDTRPHDRSGYYPIDYW

SEQ ID NO: 68578 - protein, 16 aa, Homo sapiens
CAKGKQWLVLLPLDYW

SEQ ID NO: 68579 - protein, 19 aa, Homo sapiens
CAIFSYFFWSGGCGYFDYW

SEQ ID NO: 68580 - protein, 19 aa, Homo sapiens
CARIRWVTPYIHYYYMDVW

SEQ ID NO: 68581 - protein, 22 aa, Homo sapiens
CARDRARTIFGVVIIRAGFDYW

SEQ ID NO: 68582 - protein, 21 aa, Homo sapiens
CATDLPLDYDSDGHGPVFQYW

SEQ ID NO: 68583 - protein, 18 aa, Homo sapiens
CAKSSPAYADYVVYFDFW

SEQ ID NO: 68584 - protein, 15 aa, Homo sapiens
CTRAWNMDTAAFDFW

SEQ ID NO: 68585 - protein, 19 aa, Homo sapiens
CAKYHDSSGDHYADYFHHW

SEQ ID NO: 68586 - protein, 21 aa, Homo sapiens
CVYYCARVVVPGTFAEYFHSW

SEQ ID NO: 68587 - protein, 14 aa, Homo sapiens [sequence omitted]

SEQ ID NO: 68588 - protein, 25 aa, Homo sapiens
CAKDPLGDELITMIVVVTPTYFDYW

SEQ ID NO: 68589 - protein, 19 aa, Homo sapiens
CARAYRGIAAAGTGWFDPW

SEQ ID NO: 68590 - protein, 17 aa, Homo sapiens
CARDPYSSGWYDGFDPW

SEQ ID NO: 68591 - protein, 21 aa, Homo sapiens
CARHIGYCSSTSCYLGPFDYW

SEQ ID NO: 68592 - protein, 19 aa, Homo sapiens
CARDGGWDDFWTGYYFDSW

SEQ ID NO: 68593 - protein, 15 aa, Homo sapiens
CASLDIAASGLFDYW

SEQ ID NO: 68594 - protein, 27 aa, Homo sapiens
CARGGWRNGMTTVTGRRRYYYYGMDVW

SEQ ID NO: 68595 - protein, 17 aa, Homo sapiens
CARTRGITKATRWFVPW

SEQ ID NO: 68596 - protein, 16 aa, Homo sapiens
CAHNALYRKFDYFDYW

SEQ ID NO: 68597 - protein, 20 aa, Homo sapiens
CARGLILRFLTERLHCFDPW

SEQ ID NO: 68598 - protein, 20 aa, Homo sapiens
CARLYYYDSSGYSSLYFDYW

SEQ ID NO: 68599 - protein, 15 aa, Homo sapiens
CARDRIRGVIPFDYW

SEQ ID NO: 68600 - protein, 19 aa, Homo sapiens
CTRELDSSSYYYYYYMDVW

SEQ ID NO: 68601 - protein, 22 aa, Homo sapiens
CAKDGSRIAAHNPTAYNWFDPW

SEQ ID NO: 68602 - protein, 19 aa, Homo sapiens
CARGWGERQWLVPTTFDYW

SEQ ID NO: 68603 - protein, 16 aa, Homo sapiens
CARSSRARPGHNFDYW

SEQ ID NO: 68604 - protein, 21 aa, Homo sapiens
CARGDYYGSVNYYYYYGMDVW

SEQ ID NO: 68605 - protein, 24 aa, Homo sapiens
CARCNADPDIVVVPAAICSWFDPW

SEQ ID NO: 68606 - protein, 15 aa, Homo sapiens
CATVGAYNYGPNDYW

SEQ ID NO: 68607 - protein, 20 aa, Homo sapiens
CAKGQAFLAAAGTHDAFDIW

SEQ ID NO: 68608 - protein, 14 aa, Homo sapiens
CAAWDDILSAPGLF

SEQ ID NO: 68609 - protein, 20 aa, Homo sapiens
CAKQGISGLFTILANWFDPW

SEQ ID NO: 68610 - protein, 19 aa, Homo sapiens
CAKGIGVYGSGSYHFGDYW

SEQ ID NO: 68611 - protein, 20 aa, Homo sapiens
CARDGVVTPRFYYYHYMDVW

SEQ ID NO: 68612 - protein, 15 aa, Homo sapiens
CAKDASPVVGEADYW

SEQ ID NO: 68613 - protein, 16 aa, Homo sapiens
CVRHSSKYQVREKDYW

SEQ ID NO: 68614 - protein, 17 aa, Homo sapiens
CAREYANGYDREAFDIW

SEQ ID NO: 68615 - protein, 22 aa, Homo sapiens
CARSEGYCSGGSCYRGWYFDLW

SEQ ID NO: 68616 - protein, 17 aa, Homo sapiens
CARGGMVVPGYYYMDVW

SEQ ID NO: 68617 - protein, 22 aa, Homo sapiens
CARIGNDDFWTAYYRDYYFDYW

SEQ ID NO: 68618 - protein, 15 aa, Homo sapiens
CATTSYKGVTYFDNW

SEQ ID NO: 68619 - protein, 17 aa, Homo sapiens
CAKDTGDYGDGGVFDYW

SEQ ID NO: 68620 - protein, 16 aa, Homo sapiens
CARDELELRVDAFDFW

SEQ ID NO: 68621 - protein, 19 aa, Homo sapiens
CARHSRQIDFWRGAALDYW

SEQ ID NO: 68622 - protein, 26 aa, Homo sapiens
CARAGGGKTHTEYSYGYYYYYGMDVW

SEQ ID NO: 68623 - protein, 21 aa, Homo sapiens
CARGGWYRGRGYYYYYYMDVW

SEQ ID NO: 68624 - protein, 16 aa, Homo sapiens
CAKGGAASSSNWFDTW

SEQ ID NO: 68625 - protein, 22 aa, Homo sapiens
CAIRRGRDIVVVSPPGHAFDIW

SEQ ID NO: 68626 - protein, 22 aa, Homo sapiens
CARELYCSSTSCFHPGRWFDPW

SEQ ID NO: 68627 - protein, 20 aa, Homo sapiens
CVKNYHGVTRVTEPDNFDDW

SEQ ID NO: 68628 - protein, 17 aa, Homo sapiens
CAKASMQYSYENYFDNW

SEQ ID NO: 68629 - protein, 16 aa, Homo sapiens
CAKDKGFTPSQGFDYW

SEQ ID NO: 68630 - protein, 23 aa, Homo sapiens
CAREWYYGSGSYSSYYYYGMDVW

SEQ ID NO: 68631 - protein, 17 aa, Homo sapiens
CAKDGWDGYKGAPLDYW

SEQ ID NO: 68632 - protein, 18 aa, Homo sapiens
CITDRDDFWSGYMFFAYW

SEQ ID NO: 68633 - protein, 20 aa, Homo sapiens
CARQASISPSYGSSWYMDYW

SEQ ID NO: 68634 - protein, 18 aa, Homo sapiens
CATRGNCSGGFCYTFDSW

SEQ ID NO: 68635 - protein, 19 aa, Homo sapiens
CARVSLDIRGWSISSFDMW

SEQ ID NO: 68636 - protein, 25 aa, Homo sapiens
CARDKVLGYCSGGSCYYYYYGMDVW

SEQ ID NO: 68637 - protein, 20 aa, Homo sapiens
CAKNVPGVRRAYYYFGMDVW

SEQ ID NO: 68638 - protein, 19 aa, Homo sapiens
CARIQYDILTGYLHPFDYW

SEQ ID NO: 68639 - protein, 16 aa, Homo sapiens
CASTPIPGGPRDFDYW

SEQ ID NO: 68640 - protein, 16 aa, Homo sapiens
CATLVPMVRGAPVDYW

SEQ ID NO: 68641 - protein, 20 aa, Homo sapiens
CARGTAADFWSGYLDAFDIW

SEQ ID NO: 68642 - protein, 20 aa, Homo sapiens
CAKEQYYYDSSGYNDAFDIW

SEQ ID NO: 68643 - protein, 24 aa, Homo sapiens
CARDSAARDGIAVAGIPPPLFDPW

SEQ ID NO: 68644 - protein, 20 aa, Homo sapiens
CARDQAYGDYEVSYNWFDSW

SEQ ID NO: 68645 - protein, 19 aa, Homo sapiens
CARLWQWDGYGYHFYFDLW

SEQ ID NO: 68646 - protein, 15 aa, Homo sapiens
CARHLSGYDMCADYW

SEQ ID NO: 68647 - protein, 17 aa, Homo sapiens
CARRVGVRSFYYYMDVW

SEQ ID NO: 68648 - protein, 16 aa, Homo sapiens
CARATTNRHGYSFDYW

SEQ ID NO: 68649 - protein, 20 aa, Homo sapiens
CVREASFVGTHYESNAFDIW

SEQ ID NO: 68650 - protein, 14 aa, Homo sapiens
CATWHGYQNQFDYW

SEQ ID NO: 68651 - protein, 20 aa, Homo sapiens
CARQKRITAFGKSPLEFDSW

SEQ ID NO: 68652 - protein, 15 aa, Homo sapiens
CAKGQVVGLWYFDLW

SEQ ID NO: 68653 - protein, 17 aa, Homo sapiens
CARVPGGGYDLASFDYW

SEQ ID NO: 68654 - protein, 19 aa, Homo sapiens
CVRTDLRVVASNDGSFDLW

SEQ ID NO: 68655 - protein, 19 aa, Homo sapiens
CAKVSARIFGVVKDYMDVW

SEQ ID NO: 68656 - protein, 15 aa, Homo sapiens
CARFLTWNFRYFDLW

SEQ ID NO: 68657 - protein, 22 aa, Homo sapiens
CARDQVTSPVVPTTLPYYFDYW

SEQ ID NO: 68658 - protein, 14 aa, Homo sapiens
CAKVSDAESPFDYW

SEQ ID NO: 68659 - protein, 15 aa, Homo sapiens
CARSGGSGWAYFDNW

SEQ ID NO: 68660 - protein, 18 aa, Homo sapiens
CARGGRGCSGGICYNDYW

SEQ ID NO: 68661 - protein, 19 aa, Homo sapiens
CAKDFEEGPGYYYYGMDVW

SEQ ID NO: 68662 - protein, 16 aa, Homo sapiens
CVTGTTSIALGWFDPW

SEQ ID NO: 68663 - protein, 17 aa, Homo sapiens
CAKDPLFGVVMALPDYW

SEQ ID NO: 68664 - protein, 17 aa, Homo sapiens
CGRRNQDGSGHYYFDYW

SEQ ID NO: 68665 - protein, 18 aa, Homo sapiens
CARDCSSSSSRRGGFDPW

SEQ ID NO: 68666 - protein, 22 aa, Homo sapiens
CARDHPMITFGGARINHYFDYW

SEQ ID NO: 68667 - protein, 17 aa, Homo sapiens
CARRTHLGSANWYFDYW

SEQ ID NO: 68668 - protein, 18 aa, Homo sapiens
CARARREVGQVNGWFDPW

SEQ ID NO: 68669 - protein, 23 aa, Homo sapiens
CVRASARATLVGAVIVRPYFDYW

SEQ ID NO: 68670 - protein, 12 aa, Homo sapiens
CARSKNGVVDYW

SEQ ID NO: 68671 - protein, 20 aa, Homo sapiens
CARDRATMIVVVISGAFDIW

SEQ ID NO: 68672 - protein, 19 aa, Homo sapiens
CAGHYYDSSGYYLNWFDPW

SEQ ID NO: 68673 - protein, 21 aa, Homo sapiens
CASYRSITIFGVVSPHYFDYW

SEQ ID NO: 68674 - protein, 13 aa, Homo sapiens
CTRYHSGYWFDNW

SEQ ID NO: 68675 - protein, 19 aa, Homo sapiens
CASPYDSVSGGYYYGMDVW

SEQ ID NO: 68676 - protein, 16 aa, Homo sapiens
CAKDRVGTGPLRFDPW

SEQ ID NO: 68677 - protein, 9 aa, Homo sapiens
CHQLNSYPF

SEQ ID NO: 68678 - protein, 18 aa, Homo sapiens
CTRGVTQWETRPVFFDYW

SEQ ID NO: 68679 - protein, 16 aa, Homo sapiens
CATAPAMILGGWFDPW

SEQ ID NO: 68680 - protein, 18 aa, Homo sapiens
CAHSWLYGDYVPSSFDPW

SEQ ID NO: 68681 - protein, 14 aa, Homo sapiens
CAREELVRDWFDPW

SEQ ID NO: 68682 - protein, 14 aa, Homo sapiens
CTRVDWYRNWFDPW

SEQ ID NO: 68683 - protein, 16 aa, Homo sapiens
CARVLYSSSSGYFDPW

SEQ ID NO: 68684 - protein, 19 aa, Homo sapiens
CARVTYYYAGSGYHYFDSW

SEQ ID NO: 68685 - protein, 15 aa, Homo sapiens
CARDLRKGGYDDDYW

SEQ ID NO: 68686 - protein, 21 aa, Homo sapiens
CASIIVGRAISGVVVSSFDSW

SEQ ID NO: 68687 - protein, 19 aa, Homo sapiens
CARNEAGTSDFYYYGMDVW

SEQ ID NO: 68688 - protein, 15 aa, Homo sapiens
CATRWTGEGYAPDYW

SEQ ID NO: 68689 - protein, 16 aa, Homo sapiens
CAKDHESSGYPTFDYW

SEQ ID NO: 68690 - protein, 20 aa, Homo sapiens
CARAASKYYDFWTGEGFDRW

SEQ ID NO: 68691 - protein, 17 aa, Homo sapiens
CARDNKGGYYYYGMDVW

SEQ ID NO: 68692 - protein, 19 aa, Homo sapiens
CARCGGQWLVGYYYGMDVW

SEQ ID NO: 68693 - protein, 15 aa, Homo sapiens
CARVEWLFVYYFDYW

SEQ ID NO: 68694 - protein, 13 aa, Homo sapiens
CVRGSGTYHFDYW

SEQ ID NO: 68695 - protein, 21 aa, Homo sapiens
CAKALITSSGVPLIIDAFDIW

SEQ ID NO: 68696 - protein, 16 aa, Homo sapiens
CARDGIVGATSYFDYW

SEQ ID NO: 68697 - protein, 24 aa, Homo sapiens
CARGDGLVTFHERILMPDYYFDHW

SEQ ID NO: 68698 - protein, 17 aa, Homo sapiens
CASSGVPAPYYYAMDVW

SEQ ID NO: 68699 - protein, 14 aa, Homo sapiens
CARGRDYGRWFDSW

SEQ ID NO: 68700 - protein, 15 aa, Homo sapiens
CVRDRGLVPDTFDGW

SEQ ID NO: 68701 - protein, 23 aa, Homo sapiens
CARLYCSGGSCYSGNDDDAFDIW

SEQ ID NO: 68702 - protein, 17 aa, Homo sapiens
CARDTRYLTGNYMIDYW

SEQ ID NO: 68703 - protein, 14 aa, Homo sapiens
CARRGVYYGDFDLW

SEQ ID NO: 68704 - protein, 20 aa, Homo sapiens
CARDRVSCSGYSCRSSFDYW

SEQ ID NO: 68705 - protein, 15 aa, Homo sapiens
CAREGGTRNYHFDYW

SEQ ID NO: 68706 - protein, 18 aa, Homo sapiens
CARDRISSIAAAGTIDYW

SEQ ID NO: 68707 - protein, 17 aa, Homo sapiens
CAKKAVVGNSVDWFDPW

SEQ ID NO: 68708 - protein, 20 aa, Homo sapiens
CARSYYGREYSSGWVELDYW

SEQ ID NO: 68709 - protein, 18 aa, Homo sapiens
CAKGGLGGWYDYYGMDVW

SEQ ID NO: 68710 - protein, 21 aa, Homo sapiens
CARGPTYHDFWSGYVNWFDPW

SEQ ID NO: 68711 - protein, 19 aa, Homo sapiens
CVVSILDPKYCDGGICDYW

SEQ ID NO: 68712 - protein, 16 aa, Homo sapiens
CARPIDFWIGSPFDYW

SEQ ID NO: 68713 - protein, 14 aa, Homo sapiens
CAGWRWDNACFDIW

SEQ ID NO: 68714 - protein, 14 aa, Homo sapiens
CARGGPTFSPGDYW

SEQ ID NO: 68715 - protein, 16 aa, Homo sapiens
CARTYSGSYYAPFDYW

SEQ ID NO: 68716 - protein, 24 aa, Homo sapiens
CAKLPHEAYCGGDCHPGYDAFDIW

SEQ ID NO: 68717 - protein, 18 aa, Homo sapiens
CAREENVNCGNECYYLYW

SEQ ID NO: 68718 - protein, 21 aa, Homo sapiens
CARDGSVVATTGAHYWYFDLW

SEQ ID NO: 68719 - protein, 18 aa, Homo sapiens
CARDPERLRGVPNWFDPW

SEQ ID NO: 68720 - protein, 16 aa, Homo sapiens
CARLGGAPYKSYFDYW

SEQ ID NO: 68721 - protein, 15 aa, Homo sapiens
CQMWDSSSDLPDVVF

SEQ ID NO: 68722 - protein, 19 aa, Homo sapiens
CARVIGATERLFSRAFDIW

SEQ ID NO: 68723 - protein, 14 aa, Homo sapiens
CARTRRYSNYADYW

SEQ ID NO: 68724 - protein, 19 aa, Homo sapiens
CARSWGAVAGGYYYGMDVW

SEQ ID NO: 68725 - protein, 15 aa, Homo sapiens
CAFDTSTFRGAFDSW

SEQ ID NO: 68726 - protein, 12 aa, Homo sapiens
CQKYGDSPQVIF

SEQ ID NO: 68727 - protein, 22 aa, Homo sapiens
CVRRGVTYCIDSDCNITWFDPW

SEQ ID NO: 68728 - protein, 21 aa, Homo sapiens
CARAPRYSGSYSYYYYGMDVW

SEQ ID NO: 68729 - protein, 19 aa, Homo sapiens
CARKEGKNDLLTQDVFDIW

SEQ ID NO: 68730 - protein, 20 aa, Homo sapiens
CARDGEMATTLYYYYGMDVW

SEQ ID NO: 68731 - protein, 16 aa, Homo sapiens
CARLCVIVRGNWFDPW

SEQ ID NO: 68732 - protein, 14 aa, Homo sapiens
CARSRVTTNLFDYW

SEQ ID NO: 68733 - protein, 25 aa, Homo sapiens
CVTGGRPTWSLYGASGMIQCYFDSW

SEQ ID NO: 68734 - protein, 15 aa, Homo sapiens
CAKDRGGTPYYFDFW

SEQ ID NO: 68735 - protein, 23 aa, Homo sapiens
CATARDRYCSGGSCYWEDGMDVW

SEQ ID NO: 68736 - protein, 15 aa, Homo sapiens
CARAGSHFRLQLDYW

SEQ ID NO: 68737 - protein, 20 aa, Homo sapiens
CARDTNYYDSSFYYDVFDIW

SEQ ID NO: 68738 - protein, 15 aa, Homo sapiens
CARYGVIANRWFDPW

SEQ ID NO: 68739 - protein, 29 aa, Homo sapiens
CARDSIPFSITMVRRLTWKTEYYYGMDVW

SEQ ID NO: 68740 - protein, 23 aa, Homo sapiens
CAIIGEMAATFNSGGFLLGFDIW

SEQ ID NO: 68741 - protein, 15 aa, Homo sapiens
CGRDLRDSAAFFDHW

SEQ ID NO: 68742 - protein, 15 aa, Homo sapiens
CARADPSWGNAFDVW

SEQ ID NO: 68743 - protein, 16 aa, Homo sapiens
CARIPSLTTDLYMDYW

SEQ ID NO: 68744 - protein, 23 aa, Homo sapiens
CAKDPRYCSGGSCYTFINWFDPW

SEQ ID NO: 68745 - protein, 18 aa, Homo sapiens
CATRGYCSSTSCYDSDYW

SEQ ID NO: 68746 - protein, 21 aa, Homo sapiens
CVRYYDSSGYYYVRGDAFDIW

SEQ ID NO: 68747 - protein, 15 aa, Homo sapiens
CTSLSGYSYAPRDYW

SEQ ID NO: 68748 - protein, 21 aa, Homo sapiens
CARGEYNWNDDLARNYAFDIW

SEQ ID NO: 68749 - protein, 16 aa, Homo sapiens
CSRAGIQHTPYYFDFW

SEQ ID NO: 68750 - protein, 25 aa, Homo sapiens
CARDLWQLVRRAVDHEYYYYGMDVW

SEQ ID NO: 68751 - protein, 15 aa, Homo sapiens
CAREDPQQLDGLDYW

SEQ ID NO: 68752 - protein, 25 aa, Homo sapiens
CARVGYYYGSGSKDGGDYYYGMDVW

SEQ ID NO: 68753 - protein, 24 aa, Homo sapiens
CARVSDRYYYDSSGSQSRGYFDYW

SEQ ID NO: 68754 - protein, 21 aa, Homo sapiens
CARGLAYDSSGYHSNDAFDIW

SEQ ID NO: 68755 - protein, 16 aa, Homo sapiens
CARGGRIAVAPDFDYW

SEQ ID NO: 68756 - protein, 20 aa, Homo sapiens
CARDRGCSSTSCFPNWFDPW

SEQ ID NO: 68757 - protein, 20 aa, Homo sapiens
CAILDSYGFFGSVGTSLDYW

SEQ ID NO: 68758 - protein, 14 aa, Homo sapiens
CARSKVIGHTFDIW

SEQ ID NO: 68759 - protein, 16 aa, Homo sapiens
CAKEGLLVPENYFDSW

SEQ ID NO: 68760 - protein, 15 aa, Homo sapiens
CARDLGWFGDGIDYW

SEQ ID NO: 68761 - protein, 16 aa, Homo sapiens
CAKNTYTVTVVVVDYW

SEQ ID NO: 68762 - protein, 16 aa, Homo sapiens
CASLREDINGDRFDYW

SEQ ID NO: 68763 - protein, 21 aa, Homo sapiens
CAHRHQVVVITTYRESYFDPW

SEQ ID NO: 68764 - protein, 20 aa, Homo sapiens
CARVGPVAGTFYYYYGMDVW

SEQ ID NO: 68765 - protein, 10 aa, Homo sapiens
CRMHDSSDYW

SEQ ID NO: 68766 - protein, 19 aa, Homo sapiens
CARARGLVVGETIDAFDIW

SEQ ID NO: 68767 - protein, 20 aa, Homo sapiens
CARGYRKGYGDYANDAFDIW

SEQ ID NO: 68768 - protein, 23 aa, Homo sapiens
CAKDQWGTSGYYSVYYYSALDVW

SEQ ID NO: 68769 - protein, 15 aa, Homo sapiens
CARRGYRARASFDYW

SEQ ID NO: 68770 - protein, 20 aa, Homo sapiens
CAKDQGGYSYGPPIYYFDYW

SEQ ID NO: 68771 - protein, 16 aa, Homo sapiens
CAKTPRKTGPDGMDVW

SEQ ID NO: 68772 - protein, 19 aa, Homo sapiens
CARDNNSGYYYGGSRFDYW

SEQ ID NO: 68773 - protein, 24 aa, Homo sapiens
CARAGRDTIFGVDHIREVNWFDPW

SEQ ID NO: 68774 - protein, 22 aa, Homo sapiens
CARDLGVVTSLDLGYYYGMDVW

SEQ ID NO: 68775 - protein, 17 aa, Homo sapiens
CAREVIAAAGNDAFDIW

SEQ ID NO: 68776 - protein, 22 aa, Homo sapiens
CVRDPTYEITMIEGSAWYFDLW

SEQ ID NO: 68777 - protein, 17 aa, Homo sapiens
CAKGSYYDILTGQLDYW

SEQ ID NO: 68778 - protein, 15 aa, Homo sapiens
CAREPFSGNDYFDYW

SEQ ID NO: 68779 - protein, 16 aa, Homo sapiens
CAREHLERGKRYFDSW

SEQ ID NO: 68780 - protein, 24 aa, Homo sapiens
CARLTSLSYCSSTSCYAVDAFDIW

SEQ ID NO: 68781 - protein, 16 aa, Homo sapiens
CASDFSSSSPNPFDYW

SEQ ID NO: 68782 - protein, 17 aa, Homo sapiens
CARDRSGMWLGTYFDYW

SEQ ID NO: 68783 - protein, 15 aa, Homo sapiens
CARRLAAGNWYFDLW

SEQ ID NO: 68784 - protein, 15 aa, Homo sapiens
CARGKAVADHYFDYW

SEQ ID NO: 68785 - protein, 14 aa, Homo sapiens
CTRSVGATRPFDYW

SEQ ID NO: 68786 - protein, 21 aa, Homo sapiens
CARLPARGYGSTWGDWYFDLW

SEQ ID NO: 68787 - protein, 23 aa, Homo sapiens
CAKDLHRGYSYGWQYYYYGMDVW

SEQ ID NO: 68788 - protein, 18 aa, Homo sapiens
CAKDRGVRNIVATISDYW

SEQ ID NO: 68789 - protein, 17 aa, Homo sapiens
CAKCPNYSNYGGGFDYW

SEQ ID NO: 68790 - protein, 16 aa, Homo sapiens
CAKLAVGNGWYYFDSW

SEQ ID NO: 68791 - protein, 15 aa, Homo sapiens
CAKTRGGIVGVTDYW

SEQ ID NO: 68792 - protein, 13 aa, Homo sapiens
CAHTVVAGGFIYW

SEQ ID NO: 68793 - protein, 14 aa, Homo sapiens
CASRVGDITPFDYW

SEQ ID NO: 68794 - protein, 19 aa, Homo sapiens
CARDSIAAAMGGGNWFDPW

SEQ ID NO: 68795 - protein, 18 aa, Homo sapiens
CARGKTITTAYYYAMDVW

SEQ ID NO: 68796 - protein, 17 aa, Homo sapiens
CAKPPGVVKFIRYFDSW

SEQ ID NO: 68797 - protein, 19 aa, Homo sapiens
CAHTVDSSGYLRPNWFDPW

SEQ ID NO: 68798 - protein, 17 aa, Homo sapiens
CASALGQLRNSGWFDPW

SEQ ID NO: 68799 - protein, 19 aa, Homo sapiens
CARYRVIGSSGFRDAFDIW

SEQ ID NO: 68800 - protein, 11 aa, Homo sapiens
CWSGYFPSDYW

SEQ ID NO: 68801 - protein, 27 aa, Homo sapiens
CAKSYSSRGSTYYDILTGYDYYGMDVW

SEQ ID NO: 68802 - protein, 19 aa, Homo sapiens
CTRNVLSSGWSLGDFFDCW

SEQ ID NO: 68803 - protein, 15 aa, Homo sapiens
CIRGGASGRYYFDFW

SEQ ID NO: 68804 - protein, 22 aa, Homo sapiens
CARTYCSSRNCYRVHGDWFAPW

SEQ ID NO: 68805 - protein, 17 aa, Homo sapiens
CASSIKWFGELSNFDYW

SEQ ID NO: 68806 - protein, 11 aa, Homo sapiens
CAAMVSHFDYW

SEQ ID NO: 68807 - protein, 17 aa, Homo sapiens
CAKDRGSYWDHDAFDIW

SEQ ID NO: 68808 - protein, 12 aa, Homo sapiens
CTRDEASGFDYW

SEQ ID NO: 68809 - protein, 21 aa, Homo sapiens
CARDRSTKYDYGSGSFHFDPW

SEQ ID NO: 68810 - protein, 22 aa, Homo sapiens
CAKDKGGSWPKPDYYYYGMDVW

SEQ ID NO: 68811 - protein, 22 aa, Homo sapiens
CARGTSDILVVPAAMADPFDIW

SEQ ID NO: 68812 - protein, 22 aa, Homo sapiens
CVRTVEASVYYYDSSGYYPDYW

SEQ ID NO: 68813 - protein, 18 aa, Homo sapiens
CARANGGYLRSLWYFDLW

SEQ ID NO: 68814 - protein, 20 aa, Homo sapiens
CAKDHEGGWSHYYYYGMDVW

SEQ ID NO: 68815 - protein, 20 aa, Homo sapiens
CARGRGGSRWVYYYYGMDVW

SEQ ID NO: 68816 - protein, 14 aa, Homo sapiens
CARLGLHLFYFDFW

SEQ ID NO: 68817 - protein, 24 aa, Homo sapiens
CARSLYSSGGCWNDLYYYYGMDVW

SEQ ID NO: 68818 - protein, 23 aa, Homo sapiens
CARDWNSDPCGGDCYSAEFLQHW

SEQ ID NO: 68819 - protein, 22 aa, Homo sapiens
CARDGLYCSSTSCYTIRYFDLW

SEQ ID NO: 68820 - protein, 20 aa, Homo sapiens
CATGSITVVVPATYDAFDIW

SEQ ID NO: 68821 - protein, 22 aa, Homo sapiens
CARQPAQHCSGATCYPYYFDYW

SEQ ID NO: 68822 - protein, 15 aa, Homo sapiens
CARKDFRIRRWFDPW

SEQ ID NO: 68823 - protein, 15 aa, Homo sapiens
CVRIGPTGYTYFDYW

SEQ ID NO: 68824 - protein, 21 aa, Homo sapiens
CARGVRLNQMPHYYYYGLDVW

SEQ ID NO: 68825 - protein, 23 aa, Homo sapiens
CARARQPDDYSYPQASLLFFDYW

SEQ ID NO: 68826 - protein, 17 aa, Homo sapiens
CARGPPSTIFGNWFDPW

SEQ ID NO: 68827 - protein, 18 aa, Homo sapiens
CARQGGMIVVVILPPDYW

SEQ ID NO: 68828 - protein, 16 aa, Homo sapiens
CARGSTVTTSPVFDYW

SEQ ID NO: 68829 - protein, 20 aa, Homo sapiens
CAREQVPNWIYGHYYGMDVW

SEQ ID NO: 68830 - protein, 18 aa, Homo sapiens
CGKDRWKFYYDVPDFDYW

SEQ ID NO: 68831 - protein, 18 aa, Homo sapiens
CARVLRTGTDLSDVFDIW

SEQ ID NO: 68832 - protein, 16 aa, Homo sapiens
CAREASVLVTYYFQYW

SEQ ID NO: 68833 - protein, 16 aa, Homo sapiens
CARHPPFMATNAFDIW

SEQ ID NO: 68834 - protein, 11 aa, Homo sapiens [sequence omitted]

SEQ ID NO: 68835 - protein, 19 aa, Homo sapiens
CAKVVQPALKYYYYGMDVW

SEQ ID NO: 68836 - protein, 16 aa, Homo sapiens
CQSYDSPQSYDSLWVF

SEQ ID NO: 68837 - protein, 18 aa, Homo sapiens
CARDWLRLITIFHPMDYW

SEQ ID NO: 68838 - protein, 18 aa, Homo sapiens
CAHRRLEYNYGYDAFDIW

SEQ ID NO: 68839 - protein, 16 aa, Homo sapiens
CVRDADGGDGRRLDYW

SEQ ID NO: 68840 - protein, 14 aa, Homo sapiens [sequence omitted]

SEQ ID NO: 68841 - protein, 13 aa, Homo sapiens
CAKGLDKSYFDFW

SEQ ID NO: 68842 - protein, 25 aa, Homo sapiens
CATDPVGHYASGDYHKRPAKAFDIW

SEQ ID NO: 68843 - protein, 15 aa, Homo sapiens
CARGPMMASSPFDYW

SEQ ID NO: 68844 - protein, 27 aa, Homo sapiens
CAKASGVYYYDSSGYSDYYYYYGMDVW

SEQ ID NO: 68845 - protein, 14 aa, Homo sapiens
CARDYIDGDRFDYW

SEQ ID NO: 68846 - protein, 29 aa, Homo sapiens
CARTSASPTWLINSYCSGGSCYGGPFGYW

SEQ ID NO: 68847 - protein, 14 aa, Homo sapiens
CARAPMIAPHFDFW

SEQ ID NO: 68848 - protein, 27 aa, Homo sapiens
CAREETSGDNWNYGVWTQRDYNWFDPW

SEQ ID NO: 68849 - protein, 9 aa, Homo sapiens
CHQSSSRTF

SEQ ID NO: 68850 - protein, 23 aa, Homo sapiens
CARPFPNPSYDSSGYHEGAFDIW

SEQ ID NO: 68851 - protein, 16 aa, Homo sapiens
CTRRGSFFDWPYKDYW

SEQ ID NO: 68852 - protein, 22 aa, Homo sapiens
CARDLYYDYVWGSYRPNYFDYW

SEQ ID NO: 68853 - protein, 19 aa, Homo sapiens
CAKDGRRAAGMFLSWFDPW

SEQ ID NO: 68854 - protein, 15 aa, Homo sapiens
CASLCGWYGGCTDYW

SEQ ID NO: 68855 - protein, 13 aa, Homo sapiens
CAHSYGDYDFDYW

SEQ ID NO: 68856 - protein, 21 aa, Homo sapiens
CASLGLEAFLNGAFYYALDVW

SEQ ID NO: 68857 - protein, 21 aa, Homo sapiens
CVKDLHCSSTSCYSGNWFDPW

SEQ ID NO: 68858 - protein, 13 aa, Homo sapiens
CARGPPRAHFDYW

SEQ ID NO: 68859 - protein, 17 aa, Homo sapiens
CAKDMEWELLGGHFDYW

SEQ ID NO: 68860 - protein, 15 aa, Homo sapiens
CARDLSPWDHLFDLW

SEQ ID NO: 68861 - protein, 20 aa, Homo sapiens
CARASSEKNQPQYAWYFDVW

SEQ ID NO: 68862 - protein, 22 aa, Homo sapiens
CATELNYDILTGYYKGGWFDPW

SEQ ID NO: 68863 - protein, 14 aa, Homo sapiens
CARAGLPTYFFDYW

SEQ ID NO: 68864 - protein, 19 aa, Homo sapiens
CAKVRGSYCSGGSCFFDYW

SEQ ID NO: 68865 - protein, 17 aa, Homo sapiens
CAKARNYYDSSGLFDSW

SEQ ID NO: 68866 - protein, 15 aa, Homo sapiens
CARVARYFDWPTDYW

SEQ ID NO: 68867 - protein, 21 aa, Homo sapiens
CARLGEAATSDYYYYYGMDVW

SEQ ID NO: 68868 - protein, 12 aa, Homo sapiens
CLQRLQTPTWTF

SEQ ID NO: 68869 - protein, 17 aa, Homo sapiens
CARDIANYHDSSGLDYW

SEQ ID NO: 68870 - protein, 14 aa, Homo sapiens
CARSLGRPRAFDLW

SEQ ID NO: 68871 - protein, 16 aa, Homo sapiens
CTSTVRGGYYYGMDVW

SEQ ID NO: 68872 - protein, 19 aa, Homo sapiens
CATVPGANWDILLQNFDYW

SEQ ID NO: 68873 - protein, 14 aa, Homo sapiens
CARIQLWLSWIDYW

SEQ ID NO: 68874 - protein, 17 aa, Homo sapiens
CARAGSWYCSWCDFDYW

SEQ ID NO: 68875 - protein, 13 aa, Homo sapiens
CAASSARMRFDPW

SEQ ID NO: 68876 - protein, 20 aa, Homo sapiens
CARVYLTTVVTNENDAFDIW

SEQ ID NO: 68877 - protein, 13 aa, Homo sapiens
CAKASEYYYMDVW

SEQ ID NO: 68878 - protein, 23 aa, Homo sapiens
CARSSPKYSSSWADYYYYGMDVW

SEQ ID NO: 68879 - protein, 21 aa, Homo sapiens
CAKGLGPYIAADGANWYFDLW

SEQ ID NO: 68880 - protein, 16 aa, Homo sapiens
CAKGGSSSSPDAFDIW

SEQ ID NO: 68881 - protein, 16 aa, Homo sapiens
CARPAGSYLGWYFDLW

SEQ ID NO: 68882 - protein, 17 aa, Homo sapiens
CATGARRGYDFHYMDVW

SEQ ID NO: 68883 - protein, 10 aa, Homo sapiens
CYRNSDGDYW

SEQ ID NO: 68884 - protein, 15 aa, Homo sapiens
CATVGIQQQLYFDYW

SEQ ID NO: 68885 - protein, 21 aa, Homo sapiens
CAREKDHYGSGDYYYYGMDVW

SEQ ID NO: 68886 - protein, 16 aa, Homo sapiens
CAYGGGRYGDFRFDYW

SEQ ID NO: 68887 - protein, 17 aa, Homo sapiens
CAKDSGSGSYLAGIDYW

SEQ ID NO: 68888 - protein, 16 aa, Homo sapiens
CARRNYKTREWYFDYW

SEQ ID NO: 68889 - protein, 19 aa, Homo sapiens
CERGGKWEAAVGFGQFDIW

SEQ ID NO: 68890 - protein, 24 aa, Homo sapiens
CAKDRVDSYQLLFQFLYYYGMDVW

SEQ ID NO: 68891 - protein, 17 aa, Homo sapiens
CVRVLYSNFGELIFDYW

SEQ ID NO: 68892 - protein, 19 aa, Homo sapiens
CARDYDDYGGNSRMPFDYW

SEQ ID NO: 68893 - protein, 11 aa, Homo sapiens
CQTWGHGIRVF

SEQ ID NO: 68894 - protein, 18 aa, Homo sapiens
CNTDGYYYDKSGFPVDYW

SEQ ID NO: 68895 - protein, 23 aa, Homo sapiens
CTRAPYYYDSSGYYSGQYYFDYW

SEQ ID NO: 68896 - protein, 14 aa, Homo sapiens
CARVRLWGFYFDYW

SEQ ID NO: 68897 - protein, 21 aa, Homo sapiens
CARDDRVVINRAYYYYGMDVW

SEQ ID NO: 68898 - protein, 17 aa, Homo sapiens
CVHRQELISGPPGFDYW

SEQ ID NO: 68899 - protein, 15 aa, Homo sapiens
CARWGASNWGFEDYW

SEQ ID NO: 68900 - protein, 21 aa, Homo sapiens
CAREEVVTMAHYYYYYGMDVW

SEQ ID NO: 68901 - protein, 13 aa, Homo sapiens
CAKDSPYGNIDYW

SEQ ID NO: 68902 - protein, 24 aa, Homo sapiens
CARGGVRDFWSGYREYYYYGMDVW

SEQ ID NO: 68903 - protein, 15 aa, Homo sapiens
CTRGSLSARYAFDVW

SEQ ID NO: 68904 - protein, 25 aa, Homo sapiens
CARDIRTMVVVPAARIYYYFGMDVW

SEQ ID NO: 68905 - protein, 15 aa, Homo sapiens
CARYNSGYYGYFDYW

SEQ ID NO: 68906 - protein, 14 aa, Homo sapiens
CAQSTLSSSFFDYW

SEQ ID NO: 68907 - protein, 26 aa, Homo sapiens
CARVKQKYCSGGSCPKNVVVITVDYW

SEQ ID NO: 68908 - protein, 14 aa, Homo sapiens
CAKEVGVSYYFDYW

SEQ ID NO: 68909 - protein, 20 aa, Homo sapiens
CARDDYYDSSGYYYGAFDIW

SEQ ID NO: 68910 - protein, 16 aa, Homo sapiens
CARDCGGDCYSDFDYW

SEQ ID NO: 68911 - protein, 17 aa, Homo sapiens
CARGRVATMIKYHFDFW

SEQ ID NO: 68912 - protein, 15 aa, Homo sapiens
CAKGGIAVAGIVDYW

SEQ ID NO: 68913 - protein, 16 aa, Homo sapiens
CARRPDSYGLSYFDYW

SEQ ID NO: 68914 - protein, 11 aa, Homo sapiens
CATMTTEFDTW

SEQ ID NO: 68915 - protein, 20 aa, Homo sapiens
CTTTYYDFWSGFYYYGMDVW

SEQ ID NO: 68916 - protein, 21 aa, Homo sapiens
CARKGASSGYYHPPPNWFDPW

SEQ ID NO: 68917 - protein, 15 aa, Homo sapiens
CVRDLTLGATAFDYW

SEQ ID NO: 68918 - protein, 14 aa, Homo sapiens
CARDDSYAFWFDPW

SEQ ID NO: 68919 - protein, 17 aa, Homo sapiens
CARVVDTAMVGWYFDLW

SEQ ID NO: 68920 - protein, 15 aa, Homo sapiens
CARVDGVPGRTFDFW

SEQ ID NO: 68921 - protein, 15 aa, Homo sapiens
CARPAVGGYGAFDIW

SEQ ID NO: 68922 - protein, 21 aa, Homo sapiens
CARVVSERTVTTPLLNWFDPW

SEQ ID NO: 68923 - protein, 14 aa, Homo sapiens
CAREDGSFFYFDYW

SEQ ID NO: 68924 - protein, 24 aa, Homo sapiens
CARGLIVVVTATLMVTPPGWFDPW

SEQ ID NO: 68925 - protein, 13 aa, Homo sapiens
CTRGVVIPPGDYW

SEQ ID NO: 68926 - protein, 17 aa, Homo sapiens
CARGSGYYLRTDAFDVW

SEQ ID NO: 68927 - protein, 16 aa, Homo sapiens
CVRGRAAAGTGYFQHW

SEQ ID NO: 68928 - protein, 16 aa, Homo sapiens
CAHREGSSSISYFDYW

SEQ ID NO: 68929 - protein, 18 aa, Homo sapiens
CARHGGRAAARPTYFDSW

SEQ ID NO: 68930 - protein, 18 aa, Homo sapiens
CASGRVSEQWLSHIFDYW

SEQ ID NO: 68931 - protein, 15 aa, Homo sapiens
CARLIRGYGAYGGYW

SEQ ID NO: 68932 - protein, 12 aa, Homo sapiens [sequence omitted]

SEQ ID NO: 68933 - protein, 18 aa, Homo sapiens
CTTIRSSSGYYQYYFDYW

SEQ ID NO: 68934 - protein, 12 aa, Homo sapiens
CARGVATISDYW

SEQ ID NO: 68935 - protein, 18 aa, Homo sapiens
CAKEVAQYSYGQGGFDYW

SEQ ID NO: 68936 - protein, 28 aa, Homo sapiens
CAKDRAYYDFWSGYSGANYYYSYGMDVW

SEQ ID NO: 68937 - protein, 14 aa, Homo sapiens
CARSEMGANAFAVW

SEQ ID NO: 68938 - protein, 17 aa, Homo sapiens
CARGYGWGGSSDAFDIW

SEQ ID NO: 68939 - protein, 16 aa, Homo sapiens
CARHSSGNHLSWFDPW

SEQ ID NO: 68940 - protein, 12 aa, Homo sapiens
CATLNWNSLDSW

SEQ ID NO: 68941 - protein, 17 aa, Homo sapiens
CARHLSATYFESAFYVW

SEQ ID NO: 68942 - protein, 19 aa, Homo sapiens
CARVAPEYRKLPTWYFDLW

SEQ ID NO: 68943 - protein, 19 aa, Homo sapiens
CARSPVPYDSSGYEYFQHW

SEQ ID NO: 68944 - protein, 22 aa, Homo sapiens
CARLKLSPRIGVAGPGGYFDYW

SEQ ID NO: 68945 - protein, 15 aa, Homo sapiens
CARSVYQLLSTFDPW

SEQ ID NO: 68946 - protein, 11 aa, Homo sapiens
CTRGLRPFDSW

SEQ ID NO: 68947 - protein, 25 aa, Homo sapiens
CARASSYYDILTGYSAVSINAFDIW

SEQ ID NO: 68948 - protein, 32 aa, Homo sapiens
CARVMAYYYDSSGYYSSDQRKPQYYYYGMDVW

SEQ ID NO: 68949 - protein, 21 aa, Homo sapiens
CARWGVISNTLLYYYYGMDVW

SEQ ID NO: 68950 - protein, 16 aa, Homo sapiens
CGKLDGNWGSRYIDRW

SEQ ID NO: 68951 - protein, 12 aa, Homo sapiens
CTHSTVGGGDYW

SEQ ID NO: 68952 - protein, 20 aa, Homo sapiens
CAREDIGYCNNGVCSPFDFW

SEQ ID NO: 68953 - protein, 17 aa, Homo sapiens
CARTYYYDSGSRAFDYW

SEQ ID NO: 68954 - protein, 20 aa, Homo sapiens
CARDYDILTGYRYYYGMDVW

SEQ ID NO: 68955 - protein, 16 aa, Homo sapiens
CAKVESGYYGTPFDYW

SEQ ID NO: 68956 - protein, 21 aa, Homo sapiens
CAREGMYSDGAGYYFDVKDYW

SEQ ID NO: 68957 - protein, 17 aa, Homo sapiens
CAKGILEWLFYSYFDYW

SEQ ID NO: 68958 - protein, 15 aa, Homo sapiens
CATQPYDSSGYYYYW

SEQ ID NO: 68959 - protein, 17 aa, Homo sapiens
CARAPRLAARLSSLDYW

SEQ ID NO: 68960 - protein, 13 aa, Homo sapiens
CVRHPHVGQFDPW

SEQ ID NO: 68961 - protein, 16 aa, Homo sapiens
CAKDGGSYPRVWFDPW

SEQ ID NO: 68962 - protein, 15 aa, Homo sapiens
CARPVGTTTEYFDHW

SEQ ID NO: 68963 - protein, 15 aa, Homo sapiens
CQSYDFSLRGSDVLF

SEQ ID NO: 68964 - protein, 17 aa, Homo sapiens
CAYYYDSSGHIPPFDYW

SEQ ID NO: 68965 - protein, 14 aa, Homo sapiens
CAKDYRGISRIDYW

SEQ ID NO: 68966 - protein, 29 aa, Homo sapiens
CARWRGNIVVVPAAMPHGENYYYYGMDVW

SEQ ID NO: 68967 - protein, 19 aa, Homo sapiens
CARAPYYYDSSGGNWFDPW

SEQ ID NO: 68968 - protein, 23 aa, Homo sapiens
CARVALRRITIFGVVILDAFDIW

SEQ ID NO: 68969 - protein, 16 aa, Homo sapiens
CAKNLMYQLPHWFDPW

SEQ ID NO: 68970 - protein, 10 aa, Homo sapiens
CAREYPFEYW

SEQ ID NO: 68971 - protein, 16 aa, Homo sapiens
CARVVVDYYYYGMDVW

SEQ ID NO: 68972 - protein, 15 aa, Homo sapiens
CARVVASRLTGFDYW

SEQ ID NO: 68973 - protein, 22 aa, Homo sapiens
CVRGGVVVEPSTMTRHPNFDSW

SEQ ID NO: 68974 - protein, 19 aa, Homo sapiens
CARDSPEIYITSWRYLDYW

SEQ ID NO: 68975 - protein, 19 aa, Homo sapiens
CAKDLGFGDYQVRKFFEYW

SEQ ID NO: 68976 - protein, 23 aa, Homo sapiens
CAKDPASLHGGALIAAAGPFDYW

SEQ ID NO: 68977 - protein, 16 aa, Homo sapiens
CSRLPYDYYNYGMDVW

SEQ ID NO: 68978 - protein, 17 aa, Homo sapiens
CAAAYCSGGSCNWFDPW

SEQ ID NO: 68979 - protein, 13 aa, Homo sapiens
CYSTDSSDHHYVF

SEQ ID NO: 68980 - protein, 17 aa, Homo sapiens
CVRALVAAGPLAWFDPW

SEQ ID NO: 68981 - protein, 22 aa, Homo sapiens
CARSFCSAAGCYRRHGDWFDPW

SEQ ID NO: 68982 - protein, 20 aa, Homo sapiens
CARKRITIFGAGSQVYFDPW

SEQ ID NO: 68983 - protein, 18 aa, Homo sapiens
CARDLWGYGFAGLNCDYW

SEQ ID NO: 68984 - protein, 21 aa, Homo sapiens
CARDRIHDFWSGYGGYWFDPW

SEQ ID NO: 68985 - protein, 18 aa, Homo sapiens
CATFGYYYDSSGPPPDYW

SEQ ID NO: 68986 - protein, 14 aa, Homo sapiens
CARWNTDWKAFDSW

SEQ ID NO: 68987 - protein, 22 aa, Homo sapiens
CAKASMNRVDRYNMPIWYFDIW

SEQ ID NO: 68988 - protein, 19 aa, Homo sapiens
CATVTRISVAGTLSHPDYW

SEQ ID NO: 68989 - protein, 20 aa, Homo sapiens
CASTYYYDSSGYYPDAFDIW

SEQ ID NO: 68990 - protein, 22 aa, Homo sapiens
CAKDQAGQYSYGYDYYYGMDVW

SEQ ID NO: 68991 - protein, 15 aa, Homo sapiens
CARPLVPAVNWFDPW

SEQ ID NO: 68992 - protein, 14 aa, Homo sapiens
CARLRIFSYYLDYW

SEQ ID NO: 68993 - protein, 23 aa, Homo sapiens
CARDPLKYYDFWSGYYYYGMDVW

SEQ ID NO: 68994 - protein, 16 aa, Homo sapiens
CAKDVWGSDPDYCDHW

SEQ ID NO: 68995 - protein, 16 aa, Homo sapiens
CATAAVAGTWNWFDPW

SEQ ID NO: 68996 - protein, 16 aa, Homo sapiens
CARDGGLVGATRIDYW

SEQ ID NO: 68997 - protein, 24 aa, Homo sapiens
CARGFGGVPVPGFGYYFHYGMDVW

SEQ ID NO: 68998 - protein, 16 aa, Homo sapiens
CTTDLHGGGGPLFDHW

SEQ ID NO: 68999 - protein, 16 aa, Homo sapiens
CATGYAIVGATPPDYW

SEQ ID NO: 69000 - protein, 18 aa, Homo sapiens
CARDRVDYYDSSAYCDFW

SEQ ID NO: 69001 - protein, 14 aa, Homo sapiens
CGRACGVNCYIDCW

SEQ ID NO: 69002 - protein, 14 aa, Homo sapiens
CARQQWGGWYFDLW

SEQ ID NO: 69003 - protein, 17 aa, Homo sapiens
CVKDFTRWNYEGHCDYW

SEQ ID NO: 69004 - protein, 21 aa, Homo sapiens
CQQYGSSLTFGGGTKVESITF

SEQ ID NO: 69005 - protein, 11 aa, Homo sapiens
CQQYAHYPWSF

SEQ ID NO: 69006 - protein, 14 aa, Homo sapiens
CSSYTSSITLGGIF

SEQ ID NO: 69007 - protein, 19 aa, Homo sapiens
CARDPCGGDCYYYWYFDLW

SEQ ID NO: 69008 - protein, 16 aa, Homo sapiens
CATLYSRSFPGAPDYW

SEQ ID NO: 69009 - protein, 13 aa, Homo sapiens
CARLKGRLWSDYW

SEQ ID NO: 69010 - protein, 15 aa, Homo sapiens
CAKDHIANGVCFDSW

SEQ ID NO: 69011 - protein, 22 aa, Homo sapiens
CARGTTLERGRWLLLGASFDYW

SEQ ID NO: 69012 - protein, 20 aa, Homo sapiens
CAKRIVIVPAAAPGDTFDFW

SEQ ID NO: 69013 - protein, 23 aa, Homo sapiens
CARPYPLGYCRGGSCYHDAFDIW

SEQ ID NO: 69014 - protein, 12 aa, Homo sapiens
CARDQKPPIDYW

SEQ ID NO: 69015 - protein, 19 aa, Homo sapiens
CARGRLVWKIVGHHYFDPW

SEQ ID NO: 69016 - protein, 12 aa, Homo sapiens
CQHYNNWPLYIF

SEQ ID NO: 69017 - protein, 20 aa, Homo sapiens
CASTVEGSGWYPGGGAFDIW

SEQ ID NO: 69018 - protein, 21 aa, Homo sapiens
CAGGEMATNTRPYYYYGMDVW

SEQ ID NO: 69019 - protein, 17 aa, Homo sapiens
CARIRGYSYYYYGMDVW

SEQ ID NO: 69020 - protein, 25 aa, Homo sapiens
CARAPRRGYDSSGYYQTHYWYFDLW

SEQ ID NO: 69021 - protein, 22 aa, Homo sapiens
CARAKGEITIFGVVIVNWFDPW

SEQ ID NO: 69022 - protein, 20 aa, Homo sapiens
CARGSYYYDSSGYSTGVDYW

SEQ ID NO: 69023 - protein, 12 aa, Homo sapiens
CLQYGSSNSWTF

SEQ ID NO: 69024 - protein, 15 aa, Homo sapiens
CASKFYRSSSPFDPW

SEQ ID NO: 69025 - protein, 13 aa, Homo sapiens
CAKDSGWYAFDIW

SEQ ID NO: 69026 - protein, 19 aa, Homo sapiens
CAKGHFEFYYDSSGAFDYW

SEQ ID NO: 69027 - protein, 22 aa, Homo sapiens
CARGPPYDFWSGYPDNNWFDPW

SEQ ID NO: 69028 - protein, 21 aa, Homo sapiens
CAREKNQIVLMVYAPDAFDIW

SEQ ID NO: 69029 - protein, 12 aa, Homo sapiens
CQQSFSNLLYTF

SEQ ID NO: 69030 - protein, 15 aa, Homo sapiens
CARGGWFGELPTDYW

SEQ ID NO: 69031 - protein, 23 aa, Homo sapiens
CAKDLHRLYYHGSGNGGDGMDVW

SEQ ID NO: 69032 - protein, 17 aa, Homo sapiens
CARAAPLCSGGSCYDYW

SEQ ID NO: 69033 - protein, 16 aa, Homo sapiens
CARATTVVTSTLFDYW

SEQ ID NO: 69034 - protein, 14 aa, Homo sapiens
CQVWDGRSDHHVVF

SEQ ID NO: 69035 - protein, 16 aa, Homo sapiens
CASLVVVVPAADFDYW

SEQ ID NO: 69036 - protein, 23 aa, Homo sapiens
CARARGRISLRYFDWLFYAFDMW

SEQ ID NO: 69037 - protein, 18 aa, Homo sapiens
CVKEYNYDFWSSHAFDIW

SEQ ID NO: 69038 - protein, 21 aa, Homo sapiens
CARAIRVFDTNLYANFYFDLW

SEQ ID NO: 69039 - protein, 11 aa, Homo sapiens [sequence omitted]

SEQ ID NO: 69040 - protein, 17 aa, Homo sapiens
CASLPLPGVAAAGPDYW

SEQ ID NO: 69041 - protein, 18 aa, Homo sapiens
CAKLPSFYDSSGYTLDYW

SEQ ID NO: 69042 - protein, 14 aa, Homo sapiens
CAREVSRSSGVDYW

SEQ ID NO: 69043 - protein, 20 aa, Homo sapiens
CARVKSNGGYSSSWYPNDYW

SEQ ID NO: 69044 - protein, 16 aa, Homo sapiens
CGRRNYESGQHYFDCW

SEQ ID NO: 69045 - protein, 26 aa, Homo sapiens
CARLKLGVYGDYVSSEPYYYYGMDVW

SEQ ID NO: 69046 - protein, 13 aa, Homo sapiens
CARDRAAGATDYW

SEQ ID NO: 69047 - protein, 25 aa, Homo sapiens
CARGLSVLGDHIVLMVFVINYFDYW

SEQ ID NO: 69048 - protein, 19 aa, Homo sapiens
CAREIFGNDRVDTAMIDYW

SEQ ID NO: 69049 - protein, 21 aa, Homo sapiens
CARAYGLIIMIVVAPGYFDYW

SEQ ID NO: 69050 - protein, 14 aa, Homo sapiens
CARGYGGNLYFPNW

SEQ ID NO: 69051 - protein, 18 aa, Homo sapiens
CAREVVAAIFYYYGMDVW

SEQ ID NO: 69052 - protein, 13 aa, Homo sapiens
CSRYVVLNWFDPW

SEQ ID NO: 69053 - protein, 21 aa, Homo sapiens
CAKEDSYYYDSSGYVHAFDIW

SEQ ID NO: 69054 - protein, 16 aa, Homo sapiens
CAKDIGRRWLQLFDYW

SEQ ID NO: 69055 - protein, 16 aa, Homo sapiens
CARGIAAAGGAISDYW

SEQ ID NO: 69056 - protein, 22 aa, Homo sapiens
CARVHCSGGTCFSTQLNWLDPW

SEQ ID NO: 69057 - protein, 16 aa, Homo sapiens
CAKDFHTVTAHAFDIW

SEQ ID NO: 69058 - protein, 15 aa, Homo sapiens
CAATIYPQVPPGDYW

SEQ ID NO: 69059 - protein, 26 aa, Homo sapiens
CARDMSILAAATGGRPSGIYWYFDLW

SEQ ID NO: 69060 - protein, 17 aa, Homo sapiens
CASSYGDYDTTAQFDYW

SEQ ID NO: 69061 - protein, 16 aa, Homo sapiens
CARDRDGLPAYYFDYW

SEQ ID NO: 69062 - protein, 15 aa, Homo sapiens
CAKDVSYSGAYLDYW

SEQ ID NO: 69063 - protein, 20 aa, Homo sapiens
CTRIITDYGQETRTDAFDIW

SEQ ID NO: 69064 - protein, 23 aa, Homo sapiens
CARKGPRTNGVWYHPHRGYFDLW

SEQ ID NO: 69065 - protein, 14 aa, Homo sapiens
CAATVTTRGWFDPW

SEQ ID NO: 69066 - protein, 21 aa, Homo sapiens
CATNYDYGSGSYLFRPPFDYW

SEQ ID NO: 69067 - protein, 20 aa, Homo sapiens
CARVYDSSGYYRKTYYFDYW

SEQ ID NO: 69068 - protein, 17 aa, Homo sapiens
CARDPNILTGYYALDYW

SEQ ID NO: 69069 - protein, 14 aa, Homo sapiens
CARKAYATTSFDYW

SEQ ID NO: 69070 - protein, 17 aa, Homo sapiens
CAKTHYYDRDFYAFDIW

SEQ ID NO: 69071 - protein, 16 aa, Homo sapiens
CARIVGIIQLWYFDYW

SEQ ID NO: 69072 - protein, 16 aa, Homo sapiens
CARGLYYDSSGYIDYW

SEQ ID NO: 69073 - protein, 14 aa, Homo sapiens
CVNQWLVRTYFDYW

SEQ ID NO: 69074 - protein, 11 aa, Homo sapiens
CAKEQIDFDYW

SEQ ID NO: 69075 - protein, 14 aa, Homo sapiens
CARDMYGDHNFDIW

SEQ ID NO: 69076 - protein, 22 aa, Homo sapiens
CASSSTSYDILTGYLTKHFDYW

SEQ ID NO: 69077 - protein, 16 aa, Homo sapiens
CARSKWGWGEYYFHYW

SEQ ID NO: 69078 - protein, 13 aa, Homo sapiens
CQSADNSDSSLVF

SEQ ID NO: 69079 - protein, 11 aa, Homo sapiens
CQQFTSYAWTF

SEQ ID NO: 69080 - protein, 16 aa, Homo sapiens
CAKDLEWLVLGPPDYW

SEQ ID NO: 69081 - protein, 15 aa, Homo sapiens
CARSSPDPPAYFDYW

SEQ ID NO: 69082 - protein, 20 aa, Homo sapiens
CARDRTRPEIGYSPYYFDFW

SEQ ID NO: 69083 - protein, 13 aa, Homo sapiens
CARVGAPLPPDYW

SEQ ID NO: 69084 - protein, 16 aa, Homo sapiens
CAREIPSSSSWAFDYW

SEQ ID NO: 69085 - protein, 19 aa, Homo sapiens
CARGYYDSSAYYLYYFDYW

SEQ ID NO: 69086 - protein, 14 aa, Homo sapiens
CARRSHYGDGMDVW

SEQ ID NO: 69087 - protein, 15 aa, Homo sapiens
CARDIIGYNYGSDYW

SEQ ID NO: 69088 - protein, 11 aa, Homo sapiens
CALLAVTPDYW

SEQ ID NO: 69089 - protein, 13 aa, Homo sapiens
CAKAYYSSSLDYW

SEQ ID NO: 69090 - protein, 15 aa, Homo sapiens
CVRPRSSGDYYFVYW

SEQ ID NO: 69091 - protein, 12 aa, Homo sapiens
CAKDIELGLDYW

SEQ ID NO: 69092 - protein, 19 aa, Homo sapiens
CSKAYFDRGAGVSGLFDIW

SEQ ID NO: 69093 - protein, 15 aa, Homo sapiens
CARHAYSYGLTFDYW

SEQ ID NO: 69094 - protein, 20 aa, Homo sapiens
CARVIWGLKGTTRVEYFDYW

SEQ ID NO: 69095 - protein, 18 aa, Homo sapiens
CARAPRTIFGVVNHFDYW

SEQ ID NO: 69096 - protein, 14 aa, Homo sapiens
CAKGFAFQSPLDYW

SEQ ID NO: 69097 - protein, 27 aa, Homo sapiens
CASSPSKYCSGGSCYLPPYYYYGMDVW

SEQ ID NO: 69098 - protein, 15 aa, Homo sapiens
CARGGYQLADLYDYW

SEQ ID NO: 69099 - protein, 14 aa, Homo sapiens
CTSYTVTNWYFHLW

SEQ ID NO: 69100 - protein, 20 aa, Homo sapiens
CARRFLEWFYSGPVGYFDLW

SEQ ID NO: 69101 - protein, 17 aa, Homo sapiens
CARPPYSWNYVGGYDYW

SEQ ID NO: 69102 - protein, 20 aa, Homo sapiens
CASADGYRETRPDHYYFDYW

SEQ ID NO: 69103 - protein, 18 aa, Homo sapiens
CARDGRDLVTTSRLFDSW

SEQ ID NO: 69104 - protein, 17 aa, Homo sapiens
CAKDYCSGNCLWYFDFW

SEQ ID NO: 69105 - protein, 23 aa, Homo sapiens
CARDHPSGTYYYDSSAENAFDIW

SEQ ID NO: 69106 - protein, 16 aa, Homo sapiens
CARGLAAAAGTGGDYW

SEQ ID NO: 69107 - protein, 18 aa, Homo sapiens
CASLRIATDYYYYGMDVW

SEQ ID NO: 69108 - protein, 14 aa, Homo sapiens
CARGNVQLVPFDYW

SEQ ID NO: 69109 - protein, 16 aa, Homo sapiens
CAKDQRQWELSNPDYW

SEQ ID NO: 69110 - protein, 22 aa, Homo sapiens
CASSQVVADYYSGSYYRWFDPW

SEQ ID NO: 69111 - protein, 11 aa, Homo sapiens [sequence omitted]

SEQ ID NO: 69112 - protein, 17 aa, Homo sapiens
CARDIAARSQARWFDPW

SEQ ID NO: 69113 - protein, 10 aa, Homo sapiens [sequence omitted]

SEQ ID NO: 69114 - protein, 21 aa, Homo sapiens
CARGSFKRTMYGKAYWYFDLW

SEQ ID NO: 69115 - protein, 20 aa, Homo sapiens
CARQGDDYYGSENYGVFDLW

SEQ ID NO: 69116 - protein, 14 aa, Homo sapiens
CQSYDGSTNHGGVF

SEQ ID NO: 69117 - protein, 23 aa, Homo sapiens
CAKDAPPDDFWTSGIYISYFNYW

SEQ ID NO: 69118 - protein, 30 aa, Homo sapiens
CALPISDTAMYYCARAGSSGSTARDYFEFW

SEQ ID NO: 69119 - protein, 17 aa, Homo sapiens
CARGGVWGSYRPGFDPW

SEQ ID NO: 69120 - protein, 25 aa, Homo sapiens
CAKGKRSDYYDSSGYSTDFWAFDIW

SEQ ID NO: 69121 - protein, 11 aa, Homo sapiens
CQKYNTAPRVF

SEQ ID NO: 69122 - protein, 20 aa, Homo sapiens
CARDSVDYYDSSGYPNFDYW

SEQ ID NO: 69123 - protein, 20 aa, Homo sapiens
CARLFGQGSGSYFKGWFDPW

SEQ ID NO: 69124 - protein, 18 aa, Homo sapiens
CASSGGYSYGPSNWFDPW

SEQ ID NO: 69125 - protein, 16 aa, Homo sapiens
CARGHSGWKNDAFDLW

SEQ ID NO: 69126 - protein, 23 aa, Homo sapiens
CARRDLGGGPRGKINYYYGMDVW

SEQ ID NO: 69127 - protein, 21 aa, Homo sapiens
CARMIGENHLATYYYYGMDVW

SEQ ID NO: 69128 - protein, 21 aa, Homo sapiens
CAKALAVAGTLDYYYYGMDVW

SEQ ID NO: 69129 - protein, 23 aa, Homo sapiens
CARDLPGYDILTGSYYQDGMDVW

SEQ ID NO: 69130 - protein, 20 aa, Homo sapiens
CARLSSGWSTAYYYYGMDVW

SEQ ID NO: 69131 - protein, 18 aa, Homo sapiens
CARKRAFGATLWYYFDYW

SEQ ID NO: 69132 - protein, 18 aa, Homo sapiens
CARHIPSSSRGLGFFDYW

SEQ ID NO: 69133 - protein, 20 aa, Homo sapiens
CVRDRSYCDGTRCYDLYDIW

SEQ ID NO: 69134 - protein, 13 aa, Homo sapiens
CHQYHNWPPTRAF

SEQ ID NO: 69135 - protein, 18 aa, Homo sapiens
CAKDSRGDFWSDDYFDSW

SEQ ID NO: 69136 - protein, 20 aa, Homo sapiens
CARYARYFRYSSSLNWFDPW

SEQ ID NO: 69137 - protein, 13 aa, Homo sapiens
CASSMRRYYFDYW

SEQ ID NO: 69138 - protein, 19 aa, Homo sapiens
CASLGWFGDYYYYYGMDVW

SEQ ID NO: 69139 - protein, 14 aa, Homo sapiens
CARYRDSSGYPDSW

SEQ ID NO: 69140 - protein, 23 aa, Homo sapiens
CARDDVNREIVVVISATGALDIW

SEQ ID NO: 69141 - protein, 14 aa, Homo sapiens
CARGGWKDNWFDPW

SEQ ID NO: 69142 - protein, 15 aa, Homo sapiens
CARGNGSPMGALDYW

SEQ ID NO: 69143 - protein, 15 aa, Homo sapiens
CASLLVADSVFFDYW

SEQ ID NO: 69144 - protein, 19 aa, Homo sapiens
CARGLTDCRGESCYAFGYW

SEQ ID NO: 69145 - protein, 14 aa, Homo sapiens
CARGVRPLNVLDYW

SEQ ID NO: 69146 - protein, 20 aa, Homo sapiens
CARDHAPYGDYASYNWFDPW

SEQ ID NO: 69147 - protein, 16 aa, Homo sapiens
CARIYSSGWYRGFDYW

SEQ ID NO: 69148 - protein, 17 aa, Homo sapiens
CARGGIGTPSGIAFDIW

SEQ ID NO: 69149 - protein, 17 aa, Homo sapiens
CARDRAQLWLSGAFDIW

SEQ ID NO: 69150 - protein, 13 aa, Homo sapiens
CMQALQTFGGYTF

SEQ ID NO: 69151 - protein, 14 aa, Homo sapiens
CARSRSSWHPFDYW

SEQ ID NO: 69152 - protein, 15 aa, Homo sapiens
CAAMGQDYYYGMDVW

SEQ ID NO: 69153 - protein, 17 aa, Homo sapiens
CAKLGIAVAGLDAFDIW

SEQ ID NO: 69154 - protein, 27 aa, Homo sapiens
CARDRGCYSAICRGMGDYYYNYGLDVW

SEQ ID NO: 69155 - protein, 14 aa, Homo sapiens
CASLHSSSWYFDYW

SEQ ID NO: 69156 - protein, 13 aa, Homo sapiens
CVKVSTLAVSDYW

SEQ ID NO: 69157 - protein, 12 aa, Homo sapiens [sequence omitted]

SEQ ID NO: 69158 - protein, 12 aa, Homo sapiens
CAREKGDAFDIW

SEQ ID NO: 69159 - protein, 16 aa, Homo sapiens
CAKLDRGYSLDVFHIW

SEQ ID NO: 69160 - protein, 26 aa, Homo sapiens
CATWVRTEPTIYYGSGSYYSNWLDPW

SEQ ID NO: 69161 - protein, 19 aa, Homo sapiens
CARGGEEMATTGIGAFDIW

SEQ ID NO: 69162 - protein, 10 aa, Homo sapiens
CQSADRSWVF

SEQ ID NO: 69163 - protein, 18 aa, Homo sapiens
CAIVMITFGGVIVAFGYW

SEQ ID NO: 69164 - protein, 13 aa, Homo sapiens
CAHTSIGSSFDYW

SEQ ID NO: 69165 - protein, 18 aa, Homo sapiens
CARDISRGWYPEGWFDPW

SEQ ID NO: 69166 - protein, 14 aa, Homo sapiens
CARDQGFSYFSDYW

SEQ ID NO: 69167 - protein, 20 aa, Homo sapiens
CAGNGDYEVGYYYYYGMDVW

SEQ ID NO: 69168 - protein, 20 aa, Homo sapiens
CARRYCGSSSCPSANGFDIW

SEQ ID NO: 69169 - protein, 20 aa, Homo sapiens
CARANYYDSSGYLDDAFDIW

SEQ ID NO: 69170 - protein, 10 aa, Homo sapiens
CANLGEGDYW

SEQ ID NO: 69171 - protein, 14 aa, Homo sapiens
CARGEVDAIYFDLW

SEQ ID NO: 69172 - protein, 19 aa, Homo sapiens
CAKDVQRVIHYYYYGMDVW

SEQ ID NO: 69173 - protein, 23 aa, Homo sapiens
CARGGLGQNYYDSSGYPYYFDYW

SEQ ID NO: 69174 - protein, 19 aa, Homo sapiens
CAKLRPLYAYDSSGYYNYW

SEQ ID NO: 69175 - protein, 16 aa, Homo sapiens
CARVPLASFLWYFDLW

SEQ ID NO: 69176 - protein, 19 aa, Homo sapiens
CARVGRYSYGFPGYYFDYW

SEQ ID NO: 69177 - protein, 19 aa, Homo sapiens
CARRGGRQQSHYYYGMDVW

SEQ ID NO: 69178 - protein, 14 aa, Homo sapiens
CAKTKDVGWEFDYW

SEQ ID NO: 69179 - protein, 19 aa, Homo sapiens
CAKDRVKKGNPGATTIDYW

SEQ ID NO: 69180 - protein, 24 aa, Homo sapiens
CVNTHNRNDYDGSGNLRSPYFHDW

SEQ ID NO: 69181 - protein, 28 aa, Homo sapiens
CARMVVGCRSTSCYSRDAGPPGDWVDPW

SEQ ID NO: 69182 - protein, 16 aa, Homo sapiens
CARDWRGGGYYYFDYW

SEQ ID NO: 69183 - protein, 14 aa, Homo sapiens
CARADGTPSYFYYW

SEQ ID NO: 69184 - protein, 17 aa, Homo sapiens
CAREVASGARIYHFDQW

SEQ ID NO: 69185 - protein, 20 aa, Homo sapiens
CARDGNYGSGSYGYYGMDVW

SEQ ID NO: 69186 - protein, 17 aa, Homo sapiens
CARENCSGGSCLLFDYW

SEQ ID NO: 69187 - protein, 19 aa, Homo sapiens
CASSRYSGYGHLPSGFDYW

SEQ ID NO: 69188 - protein, 22 aa, Homo sapiens
CARTWPAPDYYDYSAPGYFDYW

SEQ ID NO: 69189 - protein, 21 aa, Homo sapiens
CARSFMNTFGGGIVYDAYDIW

SEQ ID NO: 69190 - protein, 18 aa, Homo sapiens
CTRVSPVVGAFYDALDIW

SEQ ID NO: 69191 - protein, 20 aa, Homo sapiens
CARLSGGWYMSDYYYGMDVW

SEQ ID NO: 69192 - protein, 17 aa, Homo sapiens
CAKDFSSSGYSDAFDIW

SEQ ID NO: 69193 - protein, 14 aa, Homo sapiens
CAVQLVYASFFDYW

SEQ ID NO: 69194 - protein, 16 aa, Homo sapiens
CARGLTVAGDYYFDYW

SEQ ID NO: 69195 - protein, 16 aa, Homo sapiens
CAKAPHGGWYGLFDYW

SEQ ID NO: 69196 - protein, 15 aa, Homo sapiens
CARGRQYYDTNFDYW

SEQ ID NO: 69197 - protein, 17 aa, Homo sapiens
CARMQYATNWYSAFDPW

SEQ ID NO: 69198 - protein, 15 aa, Homo sapiens
CARGLVVISRFADYW

SEQ ID NO: 69199 - protein, 14 aa, Homo sapiens
CAITSTGQFYFDYW

SEQ ID NO: 69200 - protein, 18 aa, Homo sapiens
CARLGTRVPAALGWFDPW

SEQ ID NO: 69201 - protein, 23 aa, Homo sapiens
CARGRGTGTYGTPAAIVGWFDPW

SEQ ID NO: 69202 - protein, 18 aa, Homo sapiens
CARYHGAMIVGHDAFDIW

SEQ ID NO: 69203 - protein, 16 aa, Homo sapiens
CARCGYRYARDPLDIW

SEQ ID NO: 69204 - protein, 18 aa, Homo sapiens
CARPFGVVYANYYGMDVW

SEQ ID NO: 69205 - protein, 21 aa, Homo sapiens
CARDYESGVAESHYYYGMDVW

SEQ ID NO: 69206 - protein, 14 aa, Homo sapiens
CVKVGGYSGALDYW

SEQ ID NO: 69207 - protein, 15 aa, Homo sapiens
CAHRRPGITAYFDYW

SEQ ID NO: 69208 - protein, 16 aa, Homo sapiens
CTTDPYRYGDYPRDYW

SEQ ID NO: 69209 - protein, 22 aa, Homo sapiens
CARDCARKPLGYSSSWSAFDIW

SEQ ID NO: 69210 - protein, 22 aa, Homo sapiens
CARVAYSSSWYKGPLSMAMDVW

SEQ ID NO: 69211 - protein, 10 aa, Homo sapiens
CQLYGNSPHF

SEQ ID NO: 69212 - protein, 24 aa, Homo sapiens
CARERGTSLVYAIEVYYYYGLDVW

SEQ ID NO: 69213 - protein, 17 aa, Homo sapiens
CARPMVRGVIRSWFDPW

SEQ ID NO: 69214 - protein, 23 aa, Homo sapiens
CARNLHYGSAPNLNYYYYGMDVW

SEQ ID NO: 69215 - protein, 15 aa, Homo sapiens
CARKKPVAGTPLDYW

SEQ ID NO: 69216 - protein, 19 aa, Homo sapiens
CARAVGRDGYKILYYFDNW

SEQ ID NO: 69217 - protein, 12 aa, Homo sapiens
CQHYDNLPPWTF

SEQ ID NO: 69218 - protein, 15 aa, Homo sapiens
CARALATVYWYFALW

SEQ ID NO: 69219 - protein, 16 aa, Homo sapiens
CVTPHYSRTSYYLDNW

SEQ ID NO: 69220 - protein, 16 aa, Homo sapiens
CTTVPSLGSSHAFDIW

SEQ ID NO: 69221 - protein, 15 aa, Homo sapiens
CARGYNDGDDAFDIW

SEQ ID NO: 69222 - protein, 12 aa, Homo sapiens [sequence omitted]

SEQ ID NO: 69223 - protein, 17 aa, Homo sapiens
CAKGEWWVYYYYGMDVW

SEQ ID NO: 69224 - protein, 16 aa, Homo sapiens
CAHWGSGLAGNWFDPW

SEQ ID NO: 69225 - protein, 18 aa, Homo sapiens
CAKDSRAYTGNYAWFDRW

SEQ ID NO: 69226 - protein, 20 aa, Homo sapiens
CARRVSCSGGNCYLGGFDMW

SEQ ID NO: 69227 - protein, 19 aa, Homo sapiens
CARSGYCTTTSGGCIPDYW

SEQ ID NO: 69228 - protein, 23 aa, Homo sapiens
CARGNDFWSGSTPDYYYYGMDVW

SEQ ID NO: 69229 - protein, 15 aa, Homo sapiens
CARQSTRVGGPNDYW

SEQ ID NO: 69230 - protein, 12 aa, Homo sapiens
CVPGGLRYFDYW

SEQ ID NO: 69231 - protein, 14 aa, Homo sapiens
CARGDYSHGVFDPW

SEQ ID NO: 69232 - protein, 21 aa, Homo sapiens
CAKQTTPLDSGDYTEDGMDVW

SEQ ID NO: 69233 - protein, 21 aa, Homo sapiens
CARGLNRGYSYGQGGNWFDPW

SEQ ID NO: 69234 - protein, 19 aa, Homo sapiens
CARDSSGWYDPYYYGMDVW

SEQ ID NO: 69235 - protein, 16 aa, Homo sapiens
CARDGTWNDVWYFDYW

SEQ ID NO: 69236 - protein, 20 aa, Homo sapiens
CARGNSGWPQNYYYYGMDVW

SEQ ID NO: 69237 - protein, 24 aa, Homo sapiens
CARVAYGYSYGSLYYYYYYGMDVW

SEQ ID NO: 69238 - protein, 20 aa, Homo sapiens
CTRARDCSGGRCVNWDFDSW

SEQ ID NO: 69239 - protein, 14 aa, Homo sapiens
CARERAAPGSFDIW

SEQ ID NO: 69240 - protein, 19 aa, Homo sapiens
CTKEESDFWSGDLEYFQHW

SEQ ID NO: 69241 - protein, 21 aa, Homo sapiens
CARVQYYDILTGYLNDAFDIW

SEQ ID NO: 69242 - protein, 22 aa, Homo sapiens
CARDRQVVTLFDYYYYYGMDVW

SEQ ID NO: 69243 - protein, 14 aa, Homo sapiens
CARDDYGDYVFSYW

SEQ ID NO: 69244 - protein, 16 aa, Homo sapiens
CARTIFGVVIRYFDYW

SEQ ID NO: 69245 - protein, 21 aa, Homo sapiens
CARDVSTYYDFWSGYEEGDYW

SEQ ID NO: 69246 - protein, 15 aa, Homo sapiens
CARLRDGYSPWVDYW

SEQ ID NO: 69247 - protein, 12 aa, Homo sapiens
CAKTPPTQDDYW

SEQ ID NO: 69248 - protein, 17 aa, Homo sapiens
CATALSLKSSNWYFDHW

SEQ ID NO: 69249 - protein, 19 aa, Homo sapiens
CARHVRKGIVVVITWFDPW

SEQ ID NO: 69250 - protein, 19 aa, Homo sapiens
CARSLRGYYYDSSGYPGYW

SEQ ID NO: 69251 - protein, 19 aa, Homo sapiens
CTTDSGWELLRNPNWFDPW

SEQ ID NO: 69252 - protein, 23 aa, Homo sapiens
CATLQTLGWSPDYGDYEGWFDPW

SEQ ID NO: 69253 - protein, 21 aa, Homo sapiens
CARERQYYYDSSGYYYGFDIW

SEQ ID NO: 69254 - protein, 14 aa, Homo sapiens
CARANGSGSYWGYW

SEQ ID NO: 69255 - protein, 19 aa, Homo sapiens
CARGTYHYDNRGPHYLDYW

SEQ ID NO: 69256 - protein, 20 aa, Homo sapiens
CARGWSAGSTLWGGYYFDYW

SEQ ID NO: 69257 - protein, 23 aa, Homo sapiens
CAREEADFWSFRDYYYYYGMDVW

SEQ ID NO: 69258 - protein, 14 aa, Homo sapiens
CQVWDRSSDLFYVF

SEQ ID NO: 69259 - protein, 18 aa, Homo sapiens
CARAPNYATLLSYYFDLW

SEQ ID NO: 69260 - protein, 10 aa, Homo sapiens
CQQSYITPDF

SEQ ID NO: 69261 - protein, 34 aa, Homo sapiens
CARARYNHAYCGGDCYSGGSWGPPPYYYYGMDVW

SEQ ID NO: 69262 - protein, 13 aa, Homo sapiens
CQSSDISGKNVVF

SEQ ID NO: 69263 - protein, 16 aa, Homo sapiens
CAKAFIGDGYNDDDYW

SEQ ID NO: 69264 - protein, 17 aa, Homo sapiens
CATQGSHRDYDLDFDYW

SEQ ID NO: 69265 - protein, 14 aa, Homo sapiens
CARVGGGAPVLDYW

SEQ ID NO: 69266 - protein, 17 aa, Homo sapiens
CVREAFGEHQMGRFDPW

SEQ ID NO: 69267 - protein, 21 aa, Homo sapiens
CARSPRKAGTLYYYYYGMDVW

SEQ ID NO: 69268 - protein, 22 aa, Homo sapiens
CARDLPNEIVLLPAAPWGFDYW

SEQ ID NO: 69269 - protein, 19 aa, Homo sapiens
CARGGTVTPITQYWYFDLW

SEQ ID NO: 69270 - protein, 25 aa, Homo sapiens
CAKDRPDPWARITMILVRSDGMDVW

SEQ ID NO: 69271 - protein, 15 aa, Homo sapiens
CARSKIPPDWYFDLW

SEQ ID NO: 69272 - protein, 25 aa, Homo sapiens
CAKGGSGPNTAIKVGFYYYYGMDVW

SEQ ID NO: 69273 - protein, 19 aa, Homo sapiens
CAHSRVLMVYAKLNWFDPW

SEQ ID NO: 69274 - protein, 17 aa, Homo sapiens
CAREGSYPGQSPYFDYW

SEQ ID NO: 69275 - protein, 18 aa, Homo sapiens
CAKDEDQFGELTTSFDYW

SEQ ID NO: 69276 - protein, 14 aa, Homo sapiens
CARSAVVGLYFDLW

SEQ ID NO: 69277 - protein, 12 aa, Homo sapiens
CCSYTSISTLLF

SEQ ID NO: 69278 - protein, 15 aa, Homo sapiens
CARSGGSPSGWFDPW

SEQ ID NO: 69279 - protein, 20 aa, Homo sapiens
CAKGLRDDYLFYYFYGMDVW

SEQ ID NO: 69280 - protein, 13 aa, Homo sapiens
CQSVDSGGDPVIF

SEQ ID NO: 69281 - protein, 14 aa, Homo sapiens
CTATPVGLSRFDPW

SEQ ID NO: 69282 - protein, 16 aa, Homo sapiens
CARGCRYCRGEYFEYW

SEQ ID NO: 69283 - protein, 17 aa, Homo sapiens
CARRKPMVRGQGWFDPW

SEQ ID NO: 69284 - protein, 13 aa, Homo sapiens [sequence omitted]

SEQ ID NO: 69285 - protein, 16 aa, Homo sapiens
CAGGGGWYEKNAFDIW

SEQ ID NO: 69286 - protein, 19 aa, Homo sapiens
CARGYQLLPANYYYGMDVW

SEQ ID NO: 69287 - protein, 21 aa, Homo sapiens
CVKDTFCTSSGCPWVEFFQHW

SEQ ID NO: 69288 - protein, 18 aa, Homo sapiens
CARGYYGSGSYSDSIDYW

SEQ ID NO: 69289 - protein, 16 aa, Homo sapiens
CAFGSPGPNIPYFNSW

SEQ ID NO: 69290 - protein, 14 aa, Homo sapiens
CALRRSTLNYFDYW

SEQ ID NO: 69291 - protein, 17 aa, Homo sapiens
CARTILRWDQLSWFDPW

SEQ ID NO: 69292 - protein, 21 aa, Homo sapiens
CARHRPDDDHTSPYGGRLDYW

SEQ ID NO: 69293 - protein, 20 aa, Homo sapiens
CARDYHYDSTRSLPDWFDPW

SEQ ID NO: 69294 - protein, 19 aa, Homo sapiens
CARSVVPAAMPLSRWFDPW

SEQ ID NO: 69295 - protein, 21 aa, Homo sapiens
CARDLRRRISDSSSFPGFDPW

SEQ ID NO: 69296 - protein, 14 aa, Homo sapiens
CARGKWPTLYFDYW

SEQ ID NO: 69297 - protein, 15 aa, Homo sapiens
CAREGGPNCCHFDLW

SEQ ID NO: 69298 - protein, 15 aa, Homo sapiens
CAAVPAANMDYFDYW

SEQ ID NO: 69299 - protein, 12 aa, Homo sapiens [sequence omitted]

SEQ ID NO: 69300 - protein, 18 aa, Homo sapiens
CARLLRYGDYPVNYFDYW

SEQ ID NO: 69301 - protein, 14 aa, Homo sapiens
CAQSPRGVDGFHIW

SEQ ID NO: 69302 - protein, 16 aa, Homo sapiens
CARGSYGDYSDFFDYW

SEQ ID NO: 69303 - protein, 12 aa, Homo sapiens [sequence omitted]

SEQ ID NO: 69304 - protein, 19 aa, Homo sapiens
CAKDATYYYDSSGSGLDYW

SEQ ID NO: 69305 - protein, 24 aa, Homo sapiens
CARGGIAAAGPRSYYYYYYGMDVW

SEQ ID NO: 69306 - protein, 19 aa, Homo sapiens
CARGVAVAGFQNALAFDIW

SEQ ID NO: 69307 - protein, 17 aa, Homo sapiens
CAKVFSDSSGLDALDMW

SEQ ID NO: 69308 - protein, 18 aa, Homo sapiens
CARNGDSGWYVNTRFDSW

SEQ ID NO: 69309 - protein, 16 aa, Homo sapiens
CARGTERFGTWSFDPW

SEQ ID NO: 69310 - protein, 18 aa, Homo sapiens
CARGVAILTGYSGAFDIW

SEQ ID NO: 69311 - protein, 16 aa, Homo sapiens
CAGEITFGGVIEFDPW

SEQ ID NO: 69312 - protein, 17 aa, Homo sapiens
CAKDREAEAAACPFDYW

SEQ ID NO: 69313 - protein, 20 aa, Homo sapiens
CARDLSYSDTNIFYDVFDIW

SEQ ID NO: 69314 - protein, 27 aa, Homo sapiens
CAKGEGGFQYYDFWSGHLYYYYGMDVW

SEQ ID NO: 69315 - protein, 17 aa, Homo sapiens
CAKLPVAATLSYYFDYW

SEQ ID NO: 69316 - protein, 21 aa, Homo sapiens
CARDRSTSWTVPYYYYGMDVW

SEQ ID NO: 69317 - protein, 18 aa, Homo sapiens
CAKDLRNSGSAPSYFDYW

SEQ ID NO: 69318 - protein, 15 aa, Homo sapiens
CARSPLGVWSTFDYW

SEQ ID NO: 69319 - protein, 14 aa, Homo sapiens
CARLSDRVSGFDYW

SEQ ID NO: 69320 - protein, 17 aa, Homo sapiens
CAKDSMTTVTTYYFDYW

SEQ ID NO: 69321 - protein, 19 aa, Homo sapiens
CAHSIRFLEWLPINWFDPW

SEQ ID NO: 69322 - protein, 19 aa, Homo sapiens
CARQVPYGDYDGEYYFDYW

SEQ ID NO: 69323 - protein, 19 aa, Homo sapiens
CARYEVPSYDSSGYGFDYW

SEQ ID NO: 69324 - protein, 15 aa, Homo sapiens
CTKDLWPPYWSFDVW

SEQ ID NO: 69325 - protein, 16 aa, Homo sapiens
CAKYSGDWGWFYFDYW

SEQ ID NO: 69326 - protein, 18 aa, Homo sapiens
CASQYLPSNTRVAARDYW

SEQ ID NO: 69327 - protein, 27 aa, Homo sapiens
CARGQYYYGSGTYGRRLLSPYNWFDPW

SEQ ID NO: 69328 - protein, 13 aa, Homo sapiens
CASGGGYNGVDYW

SEQ ID NO: 69329 - protein, 12 aa, Homo sapiens
CAGHDKDTFDPW

SEQ ID NO: 69330 - protein, 16 aa, Homo sapiens
CAHISSDLGIALFDIW

SEQ ID NO: 69331 - protein, 20 aa, Homo sapiens
CARDRRVPLVTARPSEFDYW

SEQ ID NO: 69332 - protein, 14 aa, Homo sapiens
CSSYRSSNTLEVVF

SEQ ID NO: 69333 - protein, 14 aa, Homo sapiens
CARALEYRGTFDPW

SEQ ID NO: 69334 - protein, 11 aa, Homo sapiens
CSQNTHWPRTF

SEQ ID NO: 69335 - protein, 16 aa, Homo sapiens
CARDLRSWGSGYYDYW

SEQ ID NO: 69336 - protein, 11 aa, Homo sapiens
CQSYDSKQRVF

SEQ ID NO: 69337 - protein, 13 aa, Homo sapiens
CALSRDGYTFTYW

SEQ ID NO: 69338 - protein, 21 aa, Homo sapiens
CARASNYFDSSGYYYYAVDVW

SEQ ID NO: 69339 - protein, 19 aa, Homo sapiens
CAREFVENTGYYRGYFDYW

SEQ ID NO: 69340 - protein, 20 aa, Homo sapiens
CARDVQYCTNGVCYRYFDYW

SEQ ID NO: 69341 - protein, 21 aa, Homo sapiens
CARDRRPYSSSSYYYYGMDVW

SEQ ID NO: 69342 - protein, 15 aa, Homo sapiens
CAREVTGPRNWFDPW

SEQ ID NO: 69343 - protein, 17 aa, Homo sapiens
CARGSGSGYDGNWFDPW

SEQ ID NO: 69344 - protein, 16 aa, Homo sapiens
CAKDRNSGSYQPLDYW

SEQ ID NO: 69345 - protein, 20 aa, Homo sapiens
CAREGGYGSGSYSPNWFDPW

SEQ ID NO: 69346 - protein, 17 aa, Homo sapiens
CARDTYYDILTGFWDYW

SEQ ID NO: 69347 - protein, 17 aa, Homo sapiens
CAKNFPYDSSGYYEDYW

SEQ ID NO: 69348 - protein, 13 aa, Homo sapiens
CARHWQWELPDYW

SEQ ID NO: 69349 - protein, 17 aa, Homo sapiens
CTKGRSSGIYYYGMDVW

SEQ ID NO: 69350 - protein, 15 aa, Homo sapiens
CARHFIMNRGGIDYW

SEQ ID NO: 69351 - protein, 21 aa, Homo sapiens
CARGRSGYDFWSGESYYFDYW

SEQ ID NO: 69352 - protein, 18 aa, Homo sapiens
CARHGLSGGYYETGLDYW

SEQ ID NO: 69353 - protein, 16 aa, Homo sapiens
CVKGFYGDYVWYFDLW

SEQ ID NO: 69354 - protein, 22 aa, Homo sapiens
CARGPSSIAARELFFAEYFQHW

SEQ ID NO: 69355 - protein, 12 aa, Homo sapiens
CHQYNSFSTWTF

SEQ ID NO: 69356 - protein, 13 aa, Homo sapiens
CAREVTGTDFDYW

SEQ ID NO: 69357 - protein, 12 aa, Homo sapiens
CAKAPDRYFDLW

SEQ ID NO: 69358 - protein, 11 aa, Homo sapiens
CMQALQKGEAF

SEQ ID NO: 69359 - protein, 19 aa, Homo sapiens
CAREPTIFGVVIHDAFDIW

SEQ ID NO: 69360 - protein, 13 aa, Homo sapiens
CARASGWYEVDYW

SEQ ID NO: 69361 - protein, 21 aa, Homo sapiens
CARHTTTVTTIPYYYYGMDVW

SEQ ID NO: 69362 - protein, 19 aa, Homo sapiens
CARRPYHPTTRGNGWFDPW

SEQ ID NO: 69363 - protein, 19 aa, Homo sapiens
CAKAGGVITSTWFLYFDLW

SEQ ID NO: 69364 - protein, 16 aa, Homo sapiens
CAEARLGELSFPFDYW

SEQ ID NO: 69365 - protein, 17 aa, Homo sapiens
CAKGGLYGDYESYFDYW

SEQ ID NO: 69366 - protein, 14 aa, Homo sapiens
CARDSSWRDRNDYW

SEQ ID NO: 69367 - protein, 18 aa, Homo sapiens
CARTKMVRGVKTNPFDPW

SEQ ID NO: 69368 - protein, 18 aa, Homo sapiens
CARDRGEDSGSYGGPDYW

SEQ ID NO: 69369 - protein, 14 aa, Homo sapiens
CARSGLSLYYFDYW

SEQ ID NO: 69370 - protein, 19 aa, Homo sapiens
CAKGGGALRYLGQSSVDYW

SEQ ID NO: 69371 - protein, 16 aa, Homo sapiens
CAKVPLGWELLGIDYW

SEQ ID NO: 69372 - protein, 15 aa, Homo sapiens
CQSYDRSLGGPNWVF

SEQ ID NO: 69373 - protein, 19 aa, Homo sapiens
CARFFGVNWNYDDYYFDYW

SEQ ID NO: 69374 - protein, 12 aa, Homo sapiens
CTRAGQYRHDYW

SEQ ID NO: 69375 - protein, 19 aa, Homo sapiens
CVRDLAVPAGIKAYAMDVW

SEQ ID NO: 69376 - protein, 18 aa, Homo sapiens
CARGKGNDPIRKNWFDPW

SEQ ID NO: 69377 - protein, 15 aa, Homo sapiens
CASARDGYNREYDYW

SEQ ID NO: 69378 - protein, 20 aa, Homo sapiens
CAHRPPQWLRFRGNNWFDPW

SEQ ID NO: 69379 - protein, 24 aa, Homo sapiens
CARDGVLGIAARPATYYYYGMDVW

SEQ ID NO: 69380 - protein, 16 aa, Homo sapiens
CARDRYRGKADAFDIW

SEQ ID NO: 69381 - protein, 18 aa, Homo sapiens
CAKERTPWAYYYYGMDVW

SEQ ID NO: 69382 - protein, 14 aa, Homo sapiens
CAHRQGIWHAFDVW

SEQ ID NO: 69383 - protein, 18 aa, Homo sapiens
CARDRGHDYGNRRMGDYW

SEQ ID NO: 69384 - protein, 22 aa, Homo sapiens
CARVSSGSSGWDSGPKYYFDYW

SEQ ID NO: 69385 - protein, 18 aa, Homo sapiens
CARNVYCTNGVCPGLDYW

SEQ ID NO: 69386 - protein, 21 aa, Homo sapiens
CARPPRDCRGYNFYGDYFDYW

SEQ ID NO: 69387 - protein, 20 aa, Homo sapiens
CARAGYCSSTSCYNYYFDYW

SEQ ID NO: 69388 - protein, 14 aa, Homo sapiens
CATQAGAVVVFVYW

SEQ ID NO: 69389 - protein, 12 aa, Homo sapiens
CAHRLNGYFQHW

SEQ ID NO: 69390 - protein, 18 aa, Homo sapiens
CARGAEAIAVAGLRFDPW

SEQ ID NO: 69391 - protein, 16 aa, Homo sapiens
CARELAVAGRGMADYW

SEQ ID NO: 69392 - protein, 24 aa, Homo sapiens
CARGYCSSTSCFLIPYYYYGMDVW

SEQ ID NO: 69393 - protein, 19 aa, Homo sapiens
CARQSLFFYSVSGWTFDYW

SEQ ID NO: 69394 - protein, 21 aa, Homo sapiens
CAREGLKTLFGAPASGYFDFW

SEQ ID NO: 69395 - protein, 16 aa, Homo sapiens
CARGPHIVVVTALDYW

SEQ ID NO: 69396 - protein, 28 aa, Homo sapiens
CAKDGYCSGGGCYLSPDQPSYYYGMDVW

SEQ ID NO: 69397 - protein, 17 aa, Homo sapiens
CARDRLMAARPPWFDPW

SEQ ID NO: 69398 - protein, 16 aa, Homo sapiens
CAKDPYGAPGDWFDPW

SEQ ID NO: 69399 - protein, 14 aa, Homo sapiens
CARKIYGHFPFDLW

SEQ ID NO: 69400 - protein, 17 aa, Homo sapiens
CASITVHRYFDWSSDYW

SEQ ID NO: 69401 - protein, 26 aa, Homo sapiens
CARDRTHYNFWTTYYDQYYYYGLDVW

SEQ ID NO: 69402 - protein, 19 aa, Homo sapiens
CAKVPQVRMAARPDFFDYW

SEQ ID NO: 69403 - protein, 20 aa, Homo sapiens
CARDSCDISSCYLSGWFDPW

SEQ ID NO: 69404 - protein, 16 aa, Homo sapiens
CARGENSGYDRTTDYW

SEQ ID NO: 69405 - protein, 19 aa, Homo sapiens
CAKYHYYGSGSYTYYFDYW

SEQ ID NO: 69406 - protein, 14 aa, Homo sapiens [sequence omitted]

SEQ ID NO: 69407 - protein, 14 aa, Homo sapiens
CAKDGYVGHYFDYW

SEQ ID NO: 69408 - protein, 24 aa, Homo sapiens
CTTGNPKVLEWLLYYYYYYGMDVW

SEQ ID NO: 69409 - protein, 13 aa, Homo sapiens
CMQALQSPPMYAF

SEQ ID NO: 69410 - protein, 19 aa, Homo sapiens
CARIGYSYGYDSSWPFGYW

SEQ ID NO: 69411 - protein, 12 aa, Homo sapiens
CAALKADTLDVW

SEQ ID NO: 69412 - protein, 14 aa, Homo sapiens
CARGGAIPGFIDYW

SEQ ID NO: 69413 - protein, 20 aa, Homo sapiens
CAKDAGDGEAFAYYYGMDVW

SEQ ID NO: 69414 - protein, 17 aa, Homo sapiens
CARGGTIVVDSFILDYW

SEQ ID NO: 69415 - protein, 22 aa, Homo sapiens
CARLAGLGGPPGITGTTGFDPW

SEQ ID NO: 69416 - protein, 14 aa, Homo sapiens
CAHESSSVDWFDPW

SEQ ID NO: 69417 - protein, 16 aa, Homo sapiens
CARHLGSSSSQFFDYW

SEQ ID NO: 69418 - protein, 16 aa, Homo sapiens
CATVSWELPYNWFDPW

SEQ ID NO: 69419 - protein, 15 aa, Homo sapiens
CVRHSYTSSWSFQYW

SEQ ID NO: 69420 - protein, 19 aa, Homo sapiens
CAKDLWGPRWRVIGNFDYW

SEQ ID NO: 69421 - protein, 21 aa, Homo sapiens
CARHRYVPPKIPKKFLWFDSW

SEQ ID NO: 69422 - protein, 21 aa, Homo sapiens
CARGGVAADIVVVPAPRFDYW

SEQ ID NO: 69423 - protein, 19 aa, Homo sapiens [sequence omitted]

SEQ ID NO: 69424 - protein, 16 aa, Homo sapiens
CAKLGGSGSYNYFDHW

SEQ ID NO: 69425 - protein, 17 aa, Homo sapiens
CARGSEGFLEWLLFDYW

SEQ ID NO: 69426 - protein, 22 aa, Homo sapiens
CARGDLLEWLLSSYYYYGMDVW

SEQ ID NO: 69427 - protein, 16 aa, Homo sapiens
CARGSWLGAWDYFYIW

SEQ ID NO: 69428 - protein, 14 aa, Homo sapiens
CQSADSDSKYIWVF

SEQ ID NO: 69429 - protein, 23 aa, Homo sapiens
CARDETDGASPRDNYWGRCFDYW

SEQ ID NO: 69430 - protein, 26 aa, Homo sapiens
CARVFVVVVAARDGYKSPFYNWFDPW

SEQ ID NO: 69431 - protein, 22 aa, Homo sapiens
CARGGGYCGGGGCSRSNWFDPW

SEQ ID NO: 69432 - protein, 15 aa, Homo sapiens
CARAGLQWLAPFDYW

SEQ ID NO: 69433 - protein, 16 aa, Homo sapiens
CAKDLGVVVVYYFDYW

SEQ ID NO: 69434 - protein, 14 aa, Homo sapiens
CASQLMVYAPLDYW

SEQ ID NO: 69435 - protein, 18 aa, Homo sapiens
CARAGSSGSTARDYFEFW

SEQ ID NO: 69436 - protein, 11 aa, Homo sapiens [sequence omitted]

SEQ ID NO: 69437 - protein, 15 aa, Homo sapiens
CAREGSGDTGYFDPW

SEQ ID NO: 69438 - protein, 17 aa, Homo sapiens
CARLGWWQNPYHYFDPW

SEQ ID NO: 69439 - protein, 11 aa, Homo sapiens
CETWDATTRVF

SEQ ID NO: 69440 - protein, 17 aa, Homo sapiens
CVRDGIASRPIRPFDYW

SEQ ID NO: 69441 - protein, 20 aa, Homo sapiens
CAKDGPYYYDSSGYYSSDYW

SEQ ID NO: 69442 - protein, 23 aa, Homo sapiens
CARKVVRYFDWLSDPALNYFDYW

SEQ ID NO: 69443 - protein, 13 aa, Homo sapiens
CAHSVRGDTFDYW

SEQ ID NO: 69444 - protein, 20 aa, Homo sapiens
CARGGYCSGGSCYRNWFDPW

SEQ ID NO: 69445 - protein, 16 aa, Homo sapiens
CATNVGSGNYYNIDYW

SEQ ID NO: 69446 - protein, 18 aa, Homo sapiens
CASGLDYGDYVRSWFDPW

SEQ ID NO: 69447 - protein, 16 aa, Homo sapiens
CARRPTPPRSSPFDYW

SEQ ID NO: 69448 - protein, 15 aa, Homo sapiens
CTTEGFWSGYYSDYW

SEQ ID NO: 69449 - protein, 16 aa, Homo sapiens
CARDKAGDDNWYFALW

SEQ ID NO: 69450 - protein, 18 aa, Homo sapiens
CARHFGYTVTRQWAFDIW

SEQ ID NO: 69451 - protein, 17 aa, Homo sapiens
CARPFTDNWHAEYFQHW

SEQ ID NO: 69452 - protein, 23 aa, Homo sapiens
CARDINSYFDTGGYYPKGTFDIW

SEQ ID NO: 69453 - protein, 17 aa, Homo sapiens
CAKDGIHGGSWHYFPSW

SEQ ID NO: 69454 - protein, 20 aa, Homo sapiens
CAKDVFDWSLYYYYYGMDVW

SEQ ID NO: 69455 - protein, 24 aa, Homo sapiens
CARDVITMVRGAAPYYYYYGMDVW

SEQ ID NO: 69456 - protein, 19 aa, Homo sapiens
CAAVIEGYSSGWYHPEDYW

SEQ ID NO: 69457 - protein, 19 aa, Homo sapiens
CARDPELGLSTPYWYFDLW

SEQ ID NO: 69458 - protein, 18 aa, Homo sapiens
CARAPRCKGYCTNGVDPW

SEQ ID NO: 69459 - protein, 19 aa, Homo sapiens
CVNDCVKVAVPCQFAMDVW

SEQ ID NO: 69460 - protein, 15 aa, Homo sapiens
CARHFTIFGVATDYW

SEQ ID NO: 69461 - protein, 20 aa, Homo sapiens
CARDQYYYDSSGYSYYFDYW

SEQ ID NO: 69462 - protein, 20 aa, Homo sapiens
CAKRGFCSGGRCYSFHFDWW

SEQ ID NO: 69463 - protein, 23 aa, Homo sapiens
CARRYLFQWLVQSRRFNDAFDIW

SEQ ID NO: 69464 - protein, 14 aa, Homo sapiens
CARDSGYSHVIDYW

SEQ ID NO: 69465 - protein, 12 aa, Homo sapiens
CARFEDWAFDYW

SEQ ID NO: 69466 - protein, 17 aa, Homo sapiens
CARHQLLYYYYYGMDVW

SEQ ID NO: 69467 - protein, 26 aa, Homo sapiens
CARHAGIVVVPAAYYQTPGYNWFDPW

SEQ ID NO: 69468 - protein, 20 aa, Homo sapiens
CAHRRSGYFVWGTKDAFDIW

SEQ ID NO: 69469 - protein, 17 aa, Homo sapiens
CARLFVSGSYYLGFDYW

SEQ ID NO: 69470 - protein, 19 aa, Homo sapiens
CARLTTWIQLWVGTYFDYW

SEQ ID NO: 69471 - protein, 17 aa, Homo sapiens
CARGSRWDDYVYYFDNW

SEQ ID NO: 69472 - protein, 19 aa, Homo sapiens
CAKGGIVVVVAATGAFDIW

SEQ ID NO: 69473 - protein, 17 aa, Homo sapiens
CAKDGGGYDFRDAFDIW

SEQ ID NO: 69474 - protein, 16 aa, Homo sapiens
CASRSFLEWLAYFDYW

SEQ ID NO: 69475 - protein, 16 aa, Homo sapiens
CASAGYFLSGSSFVYW

SEQ ID NO: 69476 - protein, 15 aa, Homo sapiens
CARDGGDYVKNFDYW

SEQ ID NO: 69477 - protein, 17 aa, Homo sapiens
CARVSLSSGYSPGFDPW

SEQ ID NO: 69478 - protein, 19 aa, Homo sapiens
CARDGIEWVVPIGYAMDVW

SEQ ID NO: 69479 - protein, 18 aa, Homo sapiens
CARKHIVVVTALYYFDYW

SEQ ID NO: 69480 - protein, 21 aa, Homo sapiens
CVRHLAYYGSGSSQINYFDYW

SEQ ID NO: 69481 - protein, 17 aa, Homo sapiens
CALSPYPSYYYDGMDVW

SEQ ID NO: 69482 - protein, 11 aa, Homo sapiens
CQLYGSSGLTF

SEQ ID NO: 69483 - protein, 15 aa, Homo sapiens
CARSYSSKLRYFDYW

SEQ ID NO: 69484 - protein, 17 aa, Homo sapiens
CARDPGRGSGSGGFDYW

SEQ ID NO: 69485 - protein, 20 aa, Homo sapiens
CARDRDYFGSGTGGDAFDIW

SEQ ID NO: 69486 - protein, 15 aa, Homo sapiens
CALITDTAYYYFDYW

SEQ ID NO: 69487 - protein, 22 aa, Homo sapiens
CARDSLGGSGEFYYYYYGMDVW

SEQ ID NO: 69488 - protein, 16 aa, Homo sapiens
CARVTFGVVFNWFDPW

SEQ ID NO: 69489 - protein, 21 aa, Homo sapiens
CARNGRNSYYFDDSGYHFDYW

SEQ ID NO: 69490 - protein, 20 aa, Homo sapiens
CAKDQIGVVTAAREDAFDIW

SEQ ID NO: 69491 - protein, 21 aa, Homo sapiens
CAKEGGCSGGSCYPEYYFDYW

SEQ ID NO: 69492 - protein, 22 aa, Homo sapiens
CARHISLGWLLQTQGQCWFDPW

SEQ ID NO: 69493 - protein, 16 aa, Homo sapiens
CARDLGFGQYNWFDPW

SEQ ID NO: 69494 - protein, 24 aa, Homo sapiens
CARGVTYYYDSSGYYYGSNWFDPW

SEQ ID NO: 69495 - protein, 19 aa, Homo sapiens
CARGVLLSTHSARDAFDVW

SEQ ID NO: 69496 - protein, 24 aa, Homo sapiens
CARDPRRFLYSYGYYYYYYGMDVW

SEQ ID NO: 69497 - protein, 16 aa, Homo sapiens
CARGDRELPLDWIDSW

SEQ ID NO: 69498 - protein, 19 aa, Homo sapiens
CAKVGAHYGDTSGFFYDYW

SEQ ID NO: 69499 - protein, 21 aa, Homo sapiens
CAHMGFWSGYYTTRYYYFDYW

SEQ ID NO: 69500 - protein, 16 aa, Homo sapiens
CARHCTGGGCYSLDYW

SEQ ID NO: 69501 - protein, 16 aa, Homo sapiens
CARWEAAAGTDWFDPW

SEQ ID NO: 69502 - protein, 15 aa, Homo sapiens
CAGDSANGYIPPDYW

SEQ ID NO: 69503 - protein, 17 aa, Homo sapiens
CAKVDGSGSMGDAFDIW

SEQ ID NO: 69504 - protein, 20 aa, Homo sapiens
CARDGMGQQLIPRPDAFDIW

SEQ ID NO: 69505 - protein, 15 aa, Homo sapiens
CARAAGGTYQPFDFW

SEQ ID NO: 69506 - protein, 19 aa, Homo sapiens
CAKARPIGAAGTWGGVDYW

SEQ ID NO: 69507 - protein, 11 aa, Homo sapiens
CQSTDSSGTFW

SEQ ID NO: 69508 - protein, 14 aa, Homo sapiens
IAYYDSSGHYRDYW

SEQ ID NO: 69509 - protein, 8 aa, Homo sapiens
CQYYDNVP

SEQ ID NO: 69510 - protein, 8 aa, Homo sapiens
CQQRANWP

SEQ ID NO: 69511 - protein, 8 aa, Homo sapiens
ITEWFDPW

SEQ ID NO: 69512 - protein, 12 aa, Homo sapiens
AREYYYYYMDVW

SEQ ID NO: 69513 - protein, 10 aa, Homo sapiens
ARGSYYFDYW

SEQ ID NO: 69514 - protein, 11 aa, Homo sapiens
FGGNPDAFDIW

SEQ ID NO: 69515 - protein, 9 aa, Homo sapiens
ATPYYFDYW

SEQ ID NO: 69516 - protein, 9 aa, Homo sapiens
TINDALDIW

SEQ ID NO: 69517 - protein, 12 aa, Homo sapiens
YGSGSPDAFDIW

SEQ ID NO: 69518 - protein, 17 aa, Homo sapiens
TYYYDSSGYYRGGFDYW

SEQ ID NO: 69519 - protein, 14 aa, Homo sapiens
SYDSSGYYLDFDYW

SEQ ID NO: 69520 - protein, 11 aa, Homo sapiens
ASLNDDAFDIW

SEQ ID NO: 69521 - protein, 14 aa, Homo sapiens
VPKDSSGYFLFDYW

SEQ ID NO: 69522 - protein, 11 aa, Homo sapiens
SNNYYYYMDVW

SEQ ID NO: 69523 - protein, 13 aa, Homo sapiens
ARKPYYYYYMDVW

SEQ ID NO: 69524 - protein, 11 aa, Homo sapiens
ESHKSDAFDIW

SEQ ID NO: 69525 - protein, 10 aa, Homo sapiens
YDSSGYHDYW

SEQ ID NO: 69526 - protein, 15 aa, Homo sapiens
CGRDYYDSSGYYTQY

SEQ ID NO: 69527 - protein, 13 aa, Homo sapiens
GILTGYYTYFDYW

SEQ ID NO: 69528 - protein, 15 aa, Homo sapiens
CARENYYDSSGYFRS

SEQ ID NO: 69529 - protein, 10 aa, Homo sapiens
SSGYYYGDYW

SEQ ID NO: 69530 - protein, 15 aa, Homo sapiens
APYDYDSSGYIPDYW

SEQ ID NO: 69531 - protein, 14 aa, Homo sapiens
IYYYDSSGYYWNYW

SEQ ID NO: 69532 - protein, 11 aa, Homo sapiens
TSGLPDPFDIW

SEQ ID NO: 69533 - protein, 12 aa, Homo sapiens
SSSWYGYYFDYW

SEQ ID NO: 69534 - protein, 15 aa, Homo sapiens
AKATPRYYYYGMDVW

SEQ ID NO: 69535 - protein, 15 aa, Homo sapiens
ASTTGAYYYYGMDVW

SEQ ID NO: 69536 - protein, 17 aa, Homo sapiens
CARGKDYDFWSGYYPIY

SEQ ID NO: 69537 - protein, 13 aa, Homo sapiens
ARLYDSSGYLDYW

SEQ ID NO: 69538 - protein, 12 aa, Homo sapiens
YDSSGYYYLDYW

SEQ ID NO: 69539 - protein, 14 aa, Homo sapiens
GPYYYDSSGYFDYW

SEQ ID NO: 69540 - protein, 11 aa, Homo sapiens
IAARPYYFDYW

SEQ ID NO: 69541 - protein, 14 aa, Homo sapiens
ACYYESSGYRLDYW

SEQ ID NO: 69542 - protein, 10 aa, Homo sapiens
AGPYYYFDIW

SEQ ID NO: 69543 - protein, 12 aa, Homo sapiens
ATYYNYDAFDIW

SEQ ID NO: 69544 - protein, 12 aa, Homo sapiens
GYSSSSSYFDYW

SEQ ID NO: 69545 - protein, 11 aa, Homo sapiens
ASLSGWYVDYW

SEQ ID NO: 69546 - protein, 11 aa, Homo sapiens
YGDYDDAFDIW

SEQ ID NO: 69547 - protein, 6 aa, Homo sapiens
GPNDYW

SEQ ID NO: 69548 - protein, 12 aa, Homo sapiens
ASGDSSGSFDYW

SEQ ID NO: 69549 - protein, 16 aa, Homo sapiens
VVPAAPFYYYYGMDVW

SEQ ID NO: 69550 - protein, 10 aa, Homo sapiens
WVTTDAFDIW

SEQ ID NO: 69551 - protein, 11 aa, Homo sapiens
SGSYLSAFDIW

SEQ ID NO: 69552 - protein, 15 aa, Homo sapiens
ATDIPQDYYYGMDVW

SEQ ID NO: 69553 - protein, 12 aa, Homo sapiens
NYYGSGSYNDYW

SEQ ID NO: 69554 - protein, 15 aa, Homo sapiens
AFCSGGSCYNWFDPW

SEQ ID NO: 69555 - protein, 15 aa, Homo sapiens
CARLSYYDFWSGTGD

SEQ ID NO: 69556 - protein, 14 aa, Homo sapiens
GRCSGGSCYSVDYW

SEQ ID NO: 69557 - protein, 12 aa, Homo sapiens
SSRGYYYGMDVW

SEQ ID NO: 69558 - protein, 7 aa, Homo sapiens
IQNFDYW

SEQ ID NO: 69559 - protein, 10 aa, Homo sapiens
DSVLYYFDYW

SEQ ID NO: 69560 - protein, 14 aa, Homo sapiens
SYYDSSGYYLFDYW

SEQ ID NO: 69561 - protein, 11 aa, Homo sapiens
QGGYSNAFDIW

SEQ ID NO: 69562 - protein, 16 aa, Homo sapiens
CARVNNYDFWSGYYTY

SEQ ID NO: 69563 - protein, 14 aa, Homo sapiens
TALWSYYYYYMDVW

SEQ ID NO: 69564 - protein, 14 aa, Homo sapiens
TSRSDSSGPFFDYW

SEQ ID NO: 69565 - protein, 10 aa, Homo sapiens
AGYYARFDYW

SEQ ID NO: 69566 - protein, 11 aa, Homo sapiens
SSYFYYAVDVW

SEQ ID NO: 69567 - protein, 12 aa, Homo sapiens
HSSGWNWYFDYW

SEQ ID NO: 69568 - protein, 9 aa, Homo sapiens
GGSSHFDYW

SEQ ID NO: 69569 - protein, 11 aa, Homo sapiens
AGIFGRWFDPW

SEQ ID NO: 69570 - protein, 17 aa, Homo sapiens
ATYYYDSSGTYWYFDLW

SEQ ID NO: 69571 - protein, 10 aa, Homo sapiens
HDSSGYSDYW

SEQ ID NO: 69572 - protein, 6 aa, Homo sapiens
GTFDPW

SEQ ID NO: 69573 - protein, 17 aa, Homo sapiens
AYDSSGYYGLSDAFDIW

SEQ ID NO: 69574 - protein, 11 aa, Homo sapiens
SSGWYPRLDYW

SEQ ID NO: 69575 - protein, 16 aa, Homo sapiens
GVYYDSDGYYHAFDIW

SEQ ID NO: 69576 - protein, 11 aa, Homo sapiens
RLDGDNWFDPW

SEQ ID NO: 69577 - protein, 14 aa, Homo sapiens
ATDCSGGSCYSNYW

SEQ ID NO: 69578 - protein, 15 aa, Homo sapiens
YYYDSSGYQDAFHIW

SEQ ID NO: 69579 - protein, 17 aa, Homo sapiens
AREYDFWSGYYTGMDYW

SEQ ID NO: 69580 - protein, 11 aa, Homo sapiens
VRQTRSWFDPW

SEQ ID NO: 69581 - protein, 16 aa, Homo sapiens
ETDYYDSSGYPGFDYW

SEQ ID NO: 69582 - protein, 12 aa, Homo sapiens
ATASAYWYFDLW

SEQ ID NO: 69583 - protein, 10 aa, Homo sapiens
REQGNYFDYW

SEQ ID NO: 69584 - protein, 14 aa, Homo sapiens
YDSSGYWGDAFDIW

SEQ ID NO: 69585 - protein, 12 aa, Homo sapiens
CSGGSCPLFDYW

SEQ ID NO: 69586 - protein, 11 aa, Homo sapiens
TRQYYGSFDYW

SEQ ID NO: 69587 - protein, 12 aa, Homo sapiens
TTVRAWYYFDYW

SEQ ID NO: 69588 - protein, 11 aa, Homo sapiens
MVITPYYFDYW

SEQ ID NO: 69589 - protein, 17 aa, Homo sapiens
CARGLPRYYDFWSGYSA

SEQ ID NO: 69590 - protein, 14 aa, Homo sapiens
ARLPSGRYNWFDPW

SEQ ID NO: 69591 - protein, 7 aa, Homo sapiens
AGSSDYW

SEQ ID NO: 69592 - protein, 12 aa, Homo sapiens
KAAGPYNWFDPW

SEQ ID NO: 69593 - protein, 10 aa, Homo sapiens
ANSGNHFDYW

SEQ ID NO: 69594 - protein, 12 aa, Homo sapiens
TTGYYLGAFDIW

SEQ ID NO: 69595 - protein, 15 aa, Homo sapiens
AKGQEPYYYYTMDVW

SEQ ID NO: 69596 - protein, 10 aa, Homo sapiens
GITLHYFDYW

SEQ ID NO: 69597 - protein, 12 aa, Homo sapiens
TTDVGYGWFDPW

SEQ ID NO: 69598 - protein, 15 aa, Homo sapiens
TTVYSSSWYWYFDLW

SEQ ID NO: 69599 - protein, 16 aa, Homo sapiens
SIGGNPPYYYYYMDVW

SEQ ID NO: 69600 - protein, 47 aa, Homo sapiens
CALPIWISFLMCCWIQFASILLRIFALMFIKDIGLKFSFCVVSLPGF

SEQ ID NO: 69601 - protein, 44 aa, Homo sapiens
CSSDLFLMCCWICFASILLRILASMFIKDIGLKFSFLVVSLPGF

SEQ ID NO: 69602 - protein, 12 aa, Homo sapiens
CARGPDTSGYYY

SEQ ID NO: 69603 - protein, 11 aa, Homo sapiens
SWGPRDAFDVW

SEQ ID NO: 69604 - protein, 17 aa, Homo sapiens
AGFRDYYDSSGDAFDIW

SEQ ID NO: 69605 - protein, 41 aa, Homo sapiens
ISFLKCCWIRFASILLRIFTSMFIRDIGLKFSFFVVSLPGF

SEQ ID NO: 69606 - protein, 10 aa, Homo sapiens
SGSYSPLDYW

SEQ ID NO: 69607 - protein, 47 aa, Homo sapiens
CALPIWISFLICCWIWFASILVRIFASMFIKDIGLKFSFFVLCLPGF

SEQ ID NO: 69608 - protein, 48 aa, Homo sapiens
CALPIWWISFLMCCWIQFASILLRIFASMFIKDIGLKFSFFVVSLPGF

SEQ ID NO: 69609 - protein, 45 aa, Homo sapiens
CALPICFLMCCWIQLASILLRIFTSMFIRDIGLKFSFFVVSLPGF

SEQ ID NO: 69610 - protein, 44 aa, Homo sapiens
CSSDLLLTCCWIWFASILLRIFASMFIRDIGLKFSFSVVFLAGF

SEQ ID NO: 69611 - protein, 47 aa, Homo sapiens
CALPIWISFLMCCWIWFASILWRIFASMFITDVGLKFSFFVVSLPGF

SEQ ID NO: 69612 - protein, 39 aa, Homo sapiens
FLMCCWIQFASILLMIFTSMFIRDIGLKFSFFVVSLSGF

SEQ ID NO: 69613 - protein, 47 aa, Homo sapiens
CALPILDKLLTCCWIWFASILLRIFASMFIRDIGLKFSFSVVFLAGF

SEQ ID NO: 69614 - protein, 44 aa, Homo sapiens
CALPIFLMCCWIQFASILLRIFASMFIRDIRLKFSFFVVSLPGF

SEQ ID NO: 69615 - protein, 44 aa, Homo sapiens
CSSDLLLTCCWIWFASILLRIFASMFIGDIGLKFSFSVVFLAGF

SEQ ID NO: 69616 - protein, 47 aa, Homo sapiens
CALPIWISFLMCCWIWFASVLLKIFASMFIRDIGLKFSFFVVSLPGF

SEQ ID NO: 69617 - protein, 46 aa, Homo sapiens
CALPILSFLMCCWIWFASISFRIFALMFIRDIGLKFSFFILSLPGF

SEQ ID NO: 69618 - protein, 45 aa, Homo sapiens
CALPICFLMCCWIWFASILWKIFASMFITDVGLKFSFFVVSLPGF

SEQ ID NO: 69619 - protein, 7 aa, Homo sapiens
NPPGDYW

SEQ ID NO: 69620 - protein, 14 aa, Homo sapiens
HCSSTSCYDAFDIW

SEQ ID NO: 69621 - protein, 47 aa, Homo sapiens
CALPIWISFLMCCWIWFASISFRIFALMFIRDIGLKFSFFILSLPGF

SEQ ID NO: 69622 - protein, 47 aa, Homo sapiens
CALPIWISFLMYCWICFASILLRIFALMFIRDIGLKFSFFVVSLPGF

SEQ ID NO: 69623 - protein, 47 aa, Homo sapiens
CALPIWISFLMCCWTQFASILLRIFASMFIRDIGLKFSVFVVSLPGF

SEQ ID NO: 69624 - protein, 45 aa, Homo sapiens
CALPICFLMYCWICFASILLRIFALMFIRDIGLKFSFFVVSLPGF

SEQ ID NO: 69625 - protein, 44 aa, Homo sapiens
CALPIFLMCLSIQFASILLRIFTSMFIRDIGLKFSFFVVSLPGF

SEQ ID NO: 69626 - protein, 12 aa, Homo sapiens
TVGAGYNAFDIW

SEQ ID NO: 69627 - protein, 47 aa, Homo sapiens
CALPIWISFSMCYWIRFASILLRIFASMFFRDIGLKFSFFVVSLPGF

SEQ ID NO: 69628 - protein, 18 aa, Homo sapiens
ASRGLYYYDSSGYYFDYW

SEQ ID NO: 69629 - protein, 44 aa, Homo sapiens
CALPIFLMCCWIWFASILWKIFASMFITDVGLKFSFFVVSLPGF

SEQ ID NO: 69630 - protein, 11 aa, Homo sapiens
AAQLLFYFDYW

SEQ ID NO: 69631 - protein, 45 aa, Homo sapiens
CALPICFLTCCWIWFASILLRIFASMFIRDIRLKLSFFVVTLPGF

SEQ ID NO: 69632 - protein, 8 aa, Homo sapiens
REYYWNYW

SEQ ID NO: 69633 - protein, 15 aa, Homo sapiens
ARSYYYDSSGPFDYW

SEQ ID NO: 69634 - protein, 45 aa, Homo sapiens
CALPICFLMCCWIQSASILLRIFTLMFIRGIGLTFSFFVVSLPGF

SEQ ID NO: 69635 - protein, 14 aa, Homo sapiens
CSGGSCYGRPFDYW

SEQ ID NO: 69636 - protein, 20 aa, Homo sapiens
SPGGYYYDSSGYPIDYFDYW

SEQ ID NO: 69637 - protein, 44 aa, Homo sapiens
CSSDLSFLMCCWIRFASILRIFASMFSKDIGLKFSFLVVSLPGF

SEQ ID NO: 69638 - protein, 17 aa, Homo sapiens
RYCSGGSCYRPWAFDIW

SEQ ID NO: 69639 - protein, 11 aa, Homo sapiens
GASTNNWFDPW

SEQ ID NO: 69640 - protein, 18 aa, Homo sapiens
CAKAARGYCSGGSCYFGY

SEQ ID NO: 69641 - protein, 13 aa, Homo sapiens
PSSGWTLYYFDYW

SEQ ID NO: 69642 - protein, 9 aa, Homo sapiens
CARDESSGY

SEQ ID NO: 69643 - protein, 11 aa, Homo sapiens
ASYWNYNFDYW

SEQ ID NO: 69644 - protein, 11 aa, Homo sapiens
CARDAAFYYFD

SEQ ID NO: 69645 - protein, 14 aa, Homo sapiens
AQTNYYYYYYMDVW

SEQ ID NO: 69646 - protein, 15 aa, Homo sapiens
CAKVDSYYDFWSGPD

SEQ ID NO: 69647 - protein, 13 aa, Homo sapiens
SSTSCYVGWFDPW

SEQ ID NO: 69648 - protein, 12 aa, Homo sapiens
IAAAGTTPFDYW

SEQ ID NO: 69649 - protein, 8 aa, Homo sapiens
SSSWSDYW

SEQ ID NO: 69650 - protein, 14 aa, Homo sapiens
SSGWYRPPYYFDYW

SEQ ID NO: 69651 - protein, 10 aa, Homo sapiens
GLTSGWLDYW

SEQ ID NO: 69652 - protein, 14 aa, Homo sapiens
NGYSYGSHDAFDIW

SEQ ID NO: 69653 - protein, 14 aa, Homo sapiens
ASLYSTSSPYFDYW

SEQ ID NO: 69654 - protein, 9 aa, Homo sapiens
CQQRSGWPV

SEQ ID NO: 69655 - protein, 14 aa, Homo sapiens
ATTSPGSTDAFDIW

SEQ ID NO: 69656 - protein, 46 aa, Homo sapiens
CALPILSFLMCCCIRFASISLRIFALMFIGHIGLKFSFFVLFMPGF

SEQ ID NO: 69657 - protein, 9 aa, Homo sapiens
RGSGDYDYW

SEQ ID NO: 69658 - protein, 12 aa, Homo sapiens
DFWSGYQTVDYW

SEQ ID NO: 69659 - protein, 10 aa, Homo sapiens
SKYGSYYDYW

SEQ ID NO: 69660 - protein, 13 aa, Homo sapiens
ARLRRGNDAFDIW

SEQ ID NO: 69661 - protein, 10 aa, Homo sapiens
ARLNLYFDLW

SEQ ID NO: 69662 - protein, 11 aa, Homo sapiens
CASQGYSSFWY

SEQ ID NO: 69663 - protein, 9 aa, Homo sapiens
LLYDPFDYW

SEQ ID NO: 69664 - protein, 10 aa, Homo sapiens
VVVPAACDYW

SEQ ID NO: 69665 - protein, 17 aa, Homo sapiens
ARRYCPGGSCYDAFDIW

SEQ ID NO: 69666 - protein, 11 aa, Homo sapiens
ASRGYNYFDYW

SEQ ID NO: 69667 - protein, 10 aa, Homo sapiens
SYGAISFDYW

SEQ ID NO: 69668 - protein, 17 aa, Homo sapiens
GRTPDYYYDSSGIFDYW

SEQ ID NO: 69669 - protein, 20 aa, Homo sapiens
LRAEDTAVYYCARGYSIDYW

SEQ ID NO: 69670 - protein, 13 aa, Homo sapiens
VKQSHGLDYFDYW

SEQ ID NO: 69671 - protein, 20 aa, Homo sapiens
RETYYYDSSGYFRVGAFDIW

SEQ ID NO: 69672 - protein, 10 aa, Homo sapiens
MTPRDAFDIW

SEQ ID NO: 69673 - protein, 13 aa, Homo sapiens
RVLLWFGDAFDIW

SEQ ID NO: 69674 - protein, 8 aa, Homo sapiens
CHVWDSST

SEQ ID NO: 69675 - protein, 13 aa, Homo sapiens
NILTGYYNFFDYW

SEQ ID NO: 69676 - protein, 15 aa, Homo sapiens
YCSGGSCFPRLFDYW

SEQ ID NO: 69677 - protein, 21 aa, Homo sapiens
RPTLGYCSGGSCYRLAWFDPW

SEQ ID NO: 69678 - protein, 12 aa, Homo sapiens
LYSSSWYQFDYW

SEQ ID NO: 69679 - protein, 15 aa, Homo sapiens
TYGSSSGWYSSFDYW

SEQ ID NO: 69680 - protein, 14 aa, Homo sapiens
YGSGSYSSYYFDYW

SEQ ID NO: 69681 - protein, 17 aa, Homo sapiens
ARMNCSGPSCYPWFDYW

SEQ ID NO: 69682 - protein, 12 aa, Homo sapiens
CAYGGSNYKLTF

SEQ ID NO: 69683 - protein, 15 aa, Homo sapiens
RDLDFWSGYALWDYW

SEQ ID NO: 69684 - protein, 12 aa, Homo sapiens
AEDYYDSSADYW

SEQ ID NO: 69685 - protein, 13 aa, Homo sapiens
ARDGGFRPWFDPW

SEQ ID NO: 69686 - protein, 12 aa, Homo sapiens
GYSYGTALFDYW

SEQ ID NO: 69687 - protein, 10 aa, Homo sapiens
SGSFYSGDYW

SEQ ID NO: 69688 - protein, 11 aa, Homo sapiens
GGNEWGPFDYW

SEQ ID NO: 69689 - protein, 10 aa, Homo sapiens
YYDSESGDYW

SEQ ID NO: 69690 - protein, 9 aa, Homo sapiens
SGGSYIPTF

SEQ ID NO: 69691 - protein, 44 aa, Homo sapiens
CSSDLFLICCWIRLASILLRILVSMFIKDIGLQFSFLVMSFSGF

SEQ ID NO: 69692 - protein, 10 aa, Homo sapiens
RQVPHGFDIW

SEQ ID NO: 69693 - protein, 15 aa, Homo sapiens
LAYCSTTSCSGTDYW

SEQ ID NO: 69694 - protein, 13 aa, Homo sapiens
CALRSGGYQKVTF

SEQ ID NO: 69695 - protein, 13 aa, Homo sapiens
GGSYERGNWFDPW

SEQ ID NO: 69696 - protein, 13 aa, Homo sapiens
CAAPSGGYQKVTF

SEQ ID NO: 69697 - protein, 13 aa, Homo sapiens
CATHSGGYQKVTF

SEQ ID NO: 69698 - protein, 13 aa, Homo sapiens
CIVRSGGYQKVTF

SEQ ID NO: 69699 - protein, 13 aa, Homo sapiens
HGSGSYYNPVDYW

SEQ ID NO: 69700 - protein, 14 aa, Homo sapiens
CAFLSGGSNYKLTF

SEQ ID NO: 69701 - protein, 15 aa, Homo sapiens
TIFGVVIVVGWFDPW

SEQ ID NO: 69702 - protein, 13 aa, Homo sapiens
AGGLVRASSFDYW

SEQ ID NO: 69703 - protein, 9 aa, Homo sapiens
VYGDDGDYW

SEQ ID NO: 69704 - protein, 13 aa, Homo sapiens
RCSGGSCLYYDSW

SEQ ID NO: 69705 - protein, 11 aa, Homo sapiens
CARDHWGSFEY

SEQ ID NO: 69706 - protein, 12 aa, Homo sapiens
CVHPSGTYKYIF

SEQ ID NO: 69707 - protein, 8 aa, Homo sapiens
CQQYMHWP

SEQ ID NO: 69708 - protein, 12 aa, Homo sapiens
AAAGTIDWFDPW

SEQ ID NO: 69709 - protein, 11 aa, Homo sapiens
VASSANAFDIW

SEQ ID NO: 69710 - protein, 13 aa, Homo sapiens
CGTLSGGYQKVTF

SEQ ID NO: 69711 - protein, 45 aa, Homo sapiens
CSSDLSQLQLTTGNGLFLSEGLKLVDKFLEDVKKLYHSEAFTVNF

SEQ ID NO: 69712 - protein, 11 aa, Homo sapiens
RDSPGAHFDYW

SEQ ID NO: 69713 - protein, 45 aa, Homo sapiens
CALPISFEKKAVIKDLEFPVAFEPPLKGIMAAASRLSCGSKRKSF

SEQ ID NO: 69714 - protein, 47 aa, Homo sapiens
CALPISGCWAFLFIQTVLPSLQGPLTPDGHRVPPADHRAWLSPEGGF

SEQ ID NO: 69715 - protein, 44 aa, Homo sapiens
CSSDLFEKKAVIKDLEFPVAFEPPLKGIMAAASRLSCGSKRKSF

SEQ ID NO: 69716 - protein, 45 aa, Homo sapiens
CALPIFWASLFNQTVFLGLQGPLTPDGHRVPPADHRAWLSPEGGF

SEQ ID NO: 69717 - protein, 44 aa, Homo sapiens
CALPIWASLFNQTVFLGLQGPLTPDGHRVPPADHRAWLSPEGGF

SEQ ID NO: 69718 - protein, 46 aa, Homo sapiens
CALPICAFEKKAVIKDLEFPVAFEPPLKGIMAAASRLSCGSKRKSF

SEQ ID NO: 69719 - protein, 47 aa, Homo sapiens
CALPIFQIQTSSLESCIYMWLDKYLEEKNTKRDSPHSLPPPTIFFNF

SEQ ID NO: 69720 - protein, 41 aa, Homo sapiens
DLQTSSLESCIYMWLDKYLKEKNTKRDSPHSLPPPTIFFNF

SEQ ID NO: 69721 - protein, 39 aa, Homo sapiens
SKLCDVTEHIESVVIVVLLSSLSPVSCYTYSVPNCKLNF

SEQ ID NO: 69722 - protein, 42 aa, Homo sapiens
CALPICKARLCKVSPLQTEWFKTARMHSSIYNSKAPCTELGF

SEQ ID NO: 69723 - protein, 44 aa, Homo sapiens
CALPIWPCKARLCKVSPLQTEWFKTARMHSSIYNSKAPCTELGF

SEQ ID NO: 69724 - protein, 13 aa, Homo sapiens
CASSTGQGYEQYF

SEQ ID NO: 69725 - protein, 49 aa, Homo sapiens
CALPISRVVWRPCKARLCKVSPLQTEWFKTARMHSSIYNSKAPCTELGF

SEQ ID NO: 69726 - protein, 12 aa, Homo sapiens
CATWDGYYKKLF

SEQ ID NO: 69727 - protein, 48 aa, Homo sapiens
CLLTVSFNLSFGNMEGKRINVSKMKLRLKSSLPRKLDKSNFKAMVSTF

SEQ ID NO: 69728 - protein, 46 aa, Homo sapiens
CALPIWKHEERQLGDCQRQVSIRIWPGPVLHLGKRIFSSCFYYFTF

SEQ ID NO: 69729 - protein, 44 aa, Homo sapiens
CALPIYEERQLGDCQRQVSIRIWPGPVLHLGKRIFSSCFYYFTF

SEQ ID NO: 69730 - protein, 9 aa, Homo sapiens
CQAYDSSLV

SEQ ID NO: 69731 - protein, 11 aa, Homo sapiens
CSSRDSSGDHR

SEQ ID NO: 69732 - protein, 11 aa, Homo sapiens
CQQRSNWPPFT

SEQ ID NO: 69733 - protein, 9 aa, Homo sapiens
CYSTDGSGN

SEQ ID NO: 69734 - protein, 9 aa, Homo sapiens
CYQYGNSPP

SEQ ID NO: 69735 - protein, 10 aa, Homo sapiens
GLGSYYFDYW

SEQ ID NO: 69736 - protein, 12 aa, Homo sapiens
TGSSGWYYFDYW

SEQ ID NO: 69737 - protein, 12 aa, Homo sapiens
GRFYYYYYMEVW

SEQ ID NO: 69738 - protein, 14 aa, Homo sapiens
CSSTSCSDNWFDPW

SEQ ID NO: 69739 - protein, 14 aa, Homo sapiens
CAHSKSSAWYQIDY

SEQ ID NO: 69740 - protein, 14 aa, Homo sapiens
GGNPNYYYYGMDVW

SEQ ID NO: 69741 - protein, 12 aa, Homo sapiens
AQIDYYYYMDVW

SEQ ID NO: 69742 - protein, 12 aa, Homo sapiens
ATYDNSGYFDYW

SEQ ID NO: 69743 - protein, 13 aa, Homo sapiens
GTSAYYYYYMDVW

SEQ ID NO: 69744 - protein, 15 aa, Homo sapiens
AKGTDWYYYYGMDVW

SEQ ID NO: 69745 - protein, 10 aa, Homo sapiens
GVDYYYMDVW

SEQ ID NO: 69746 - protein, 17 aa, Homo sapiens
TTQYYYDSSGYYYGDYW

SEQ ID NO: 69747 - protein, 15 aa, Homo sapiens
VSYDSSGYHRRFDYW

SEQ ID NO: 69748 - protein, 12 aa, Homo sapiens
GSGSYYTPFDYW

SEQ ID NO: 69749 - protein, 13 aa, Homo sapiens
TTDSSGYFAFDIW

SEQ ID NO: 69750 - protein, 10 aa, Homo sapiens
TGDGNWFDPW

SEQ ID NO: 69751 - protein, 12 aa, Homo sapiens
AEDYYYYFMDVW

SEQ ID NO: 69752 - protein, 16 aa, Homo sapiens
TLGGYYYDSSGYYVYW

SEQ ID NO: 69753 - protein, 15 aa, Homo sapiens
SSGWYNYYYYGMDVW

SEQ ID NO: 69754 - protein, 11 aa, Homo sapiens
CAKDTYDSSGY

SEQ ID NO: 69755 - protein, 11 aa, Homo sapiens
ATISGYPVDYW

SEQ ID NO: 69756 - protein, 12 aa, Homo sapiens
SSGWYLGWFDPW

SEQ ID NO: 69757 - protein, 15 aa, Homo sapiens
YYDSSGYHPLPFDYW

SEQ ID NO: 69758 - protein, 12 aa, Homo sapiens
AKAGTRYYFDYW

SEQ ID NO: 69759 - protein, 11 aa, Homo sapiens
IAGDYYYMDVW

SEQ ID NO: 69760 - protein, 12 aa, Homo sapiens
DCSGGSCYPDYW

SEQ ID NO: 69761 - protein, 8 aa, Homo sapiens
RHNAFEIW

SEQ ID NO: 69762 - protein, 11 aa, Homo sapiens
VTGPKYYFDSW

SEQ ID NO: 69763 - protein, 14 aa, Homo sapiens
LSRYSSSWYYFDYW

SEQ ID NO: 69764 - protein, 17 aa, Homo sapiens
VGYCSGGSCYSGAFDIW

SEQ ID NO: 69765 - protein, 9 aa, Homo sapiens
RGYNDFDYW

SEQ ID NO: 69766 - protein, 14 aa, Homo sapiens
CAKGDCSGGSCYDY

SEQ ID NO: 69767 - protein, 12 aa, Homo sapiens
TTLYEAYYFDYW

SEQ ID NO: 69768 - protein, 12 aa, Homo sapiens
APAATEGWFDPW

SEQ ID NO: 69769 - protein, 13 aa, Homo sapiens
HLYYDSFGGFDYW

SEQ ID NO: 69770 - protein, 12 aa, Homo sapiens
GHFHYYSAMDVW

SEQ ID NO: 69771 - protein, 8 aa, Homo sapiens
GSGTHDYW

SEQ ID NO: 69772 - protein, 11 aa, Homo sapiens
GTYGDWAFDIW

SEQ ID NO: 69773 - protein, 15 aa, Homo sapiens
CAKDLTYYYDSSGQN

SEQ ID NO: 69774 - protein, 11 aa, Homo sapiens
SSGYYPASDYW

SEQ ID NO: 69775 - protein, 13 aa, Homo sapiens
YCSGGRCYAFDYW

SEQ ID NO: 69776 - protein, 10 aa, Homo sapiens
CARAGNYYYS

SEQ ID NO: 69777 - protein, 14 aa, Homo sapiens
GSCSGGSCYSFDYW

SEQ ID NO: 69778 - protein, 13 aa, Homo sapiens
TEYSSSSPYFDYW

SEQ ID NO: 69779 - protein, 15 aa, Homo sapiens
SFGSGSYYYYALDVW

SEQ ID NO: 69780 - protein, 18 aa, Homo sapiens
VVVVPATPGYYYYGMDVW

SEQ ID NO: 69781 - protein, 13 aa, Homo sapiens
VMTTGRYNWFDPW

SEQ ID NO: 69782 - protein, 14 aa, Homo sapiens
TTESGWYGVYFDYW

SEQ ID NO: 69783 - protein, 17 aa, Homo sapiens
AGKSCSSTSCYSDFDYW

SEQ ID NO: 69784 - protein, 14 aa, Homo sapiens
GPDYYDSSGPFDYW

SEQ ID NO: 69785 - protein, 11 aa, Homo sapiens
DSSGYPVGDYW

SEQ ID NO: 69786 - protein, 10 aa, Homo sapiens
DYGDNQFDYW

SEQ ID NO: 69787 - protein, 8 aa, Homo sapiens
CAKDLGGY

SEQ ID NO: 69788 - protein, 9 aa, Homo sapiens
DSSGLCDYW

SEQ ID NO: 69789 - protein, 12 aa, Homo sapiens
GSGSYNRPFDYW

SEQ ID NO: 69790 - protein, 16 aa, Homo sapiens
YDILTGYVYYYSMDVW

SEQ ID NO: 69791 - protein, 13 aa, Homo sapiens
ARRGYYEYYFDSW

SEQ ID NO: 69792 - protein, 13 aa, Homo sapiens
TGRDGYNYAFDYW

SEQ ID NO: 69793 - protein, 11 aa, Homo sapiens
ASWGGNSFDYW

SEQ ID NO: 69794 - protein, 10 aa, Homo sapiens
TGLRGWFDPW

SEQ ID NO: 69795 - protein, 10 aa, Homo sapiens
CANDGPGYYD

SEQ ID NO: 69796 - protein, 10 aa, Homo sapiens
CARDRLYFDT

SEQ ID NO: 69797 - protein, 15 aa, Homo sapiens
ARLDYYDSTGKFDYW

SEQ ID NO: 69798 - protein, 17 aa, Homo sapiens
AFDILTGYYGVYYFDYW

SEQ ID NO: 69799 - protein, 15 aa, Homo sapiens
YCSGGSCYSPAFDIW

SEQ ID NO: 69800 - protein, 45 aa, Homo sapiens
CALPICFLMCCWIWFASILLRVFALMFIKDIGLKFSLFVVSLPGF

SEQ ID NO: 69801 - protein, 47 aa, Homo sapiens
CALPIWISFLMCCWIQFASILLRIFILMFIRDIGLKFSFFVVSLSGF

SEQ ID NO: 69802 - protein, 45 aa, Homo sapiens
CALPICFLMYCWIRFASILLRIFALMFIRDIGLKFSLFVVCLPGF

SEQ ID NO: 69803 - protein, 47 aa, Homo sapiens
CALPIWISFLICCWIRFASILLRIFASMFIKDIGLKFSFLVVSLPGF

SEQ ID NO: 69804 - protein, 44 aa, Homo sapiens
CALPIFLMCCWIRFASILLRIFTSMFIRDIGLKFSFFVVSLPGF

SEQ ID NO: 69805 - protein, 45 aa, Homo sapiens
CALPIYFLMCCWIRFASILLRIFASMFIRDIGLEFSFFVVSLPGF

SEQ ID NO: 69806 - protein, 47 aa, Homo sapiens
CALPIWISFLMCCWIWFASILLRIFALMFIRYTGLKFSFIVLSLPGF

SEQ ID NO: 69807 - protein, 44 aa, Homo sapiens
CSSDLFLMCCWIRFASILLRIFASMFIKDIGLKFSFFVVSLPGF

SEQ ID NO: 69808 - protein, 47 aa, Homo sapiens
CALPIWISFLMCWWIQFASILLKIFASIFIRDIGLKFSFFVVSLPGF

SEQ ID NO: 69809 - protein, 44 aa, Homo sapiens
CALPIFLMCCWIQFASILLRIFASMFIRDIGLKFSFFVLSLSGF

SEQ ID NO: 69810 - protein, 46 aa, Homo sapiens
CALPIWISFLTCCWIRFASILLRIFASMFIREIGLKFFFCLSLPGF

SEQ ID NO: 69811 - protein, 44 aa, Homo sapiens
CSSDLFLMCCWIWFASILLRIFASMFIKDIGLKCSFFVVSLPGF

SEQ ID NO: 69812 - protein, 46 aa, Homo sapiens
CALPILSFLMCCWIQFASILLRIFALMFMKDTGLKFSFVVVSLPGF

SEQ ID NO: 69813 - protein, 47 aa, Homo sapiens
CALPIWISFFMCCCIQFASILLRIFALMFIRDIGLKLSFFVVSLPGF

SEQ ID NO: 69814 - protein, 47 aa, Homo sapiens
CALPIWISFLICCWIQFPSILLRIFASMFIRDIGLKFSSFVVSLPGF

SEQ ID NO: 69815 - protein, 10 aa, Homo sapiens
CAKDRRGYVD

SEQ ID NO: 69816 - protein, 45 aa, Homo sapiens
CALPICFLMCCWIQFASILLMIFTSMFIRDIGLKFSFFVVSLSGF

SEQ ID NO: 69817 - protein, 44 aa, Homo sapiens
CSSDLLLTFCWIWFASILLRIFASMFIRDIGLKFSFSVVFLAGF

SEQ ID NO: 69818 - protein, 10 aa, Homo sapiens
TMTNDAFDIW

SEQ ID NO: 69819 - protein, 13 aa, Homo sapiens
GSSSSSSGWFDPW

SEQ ID NO: 69820 - protein, 23 aa, Homo sapiens
AVLYCSSTSCYATNYYYYGMDVW

SEQ ID NO: 69821 - protein, 44 aa, Homo sapiens
CALPIFLMCCWIQSASILLRIFTLMFIRGIGLTFSFFVVSLPGF

SEQ ID NO: 69822 - protein, 42 aa, Homo sapiens
LDKLLTCCWIWFASILLRIFASMFIRDIGLKFSFSVVFLAGF

SEQ ID NO: 69823 - protein, 10 aa, Homo sapiens
VRGYSSPDYW

SEQ ID NO: 69824 - protein, 47 aa, Homo sapiens
CALPIWISFLMRCWNWFASILLRIFTSILFRDIGLKFSFSVVSLPGF

SEQ ID NO: 69825 - protein, 48 aa, Homo sapiens
CALPIWMDKLLTCCWIWFASILLRIFASMFIRDIGLKFSFSVVFLAGF

SEQ ID NO: 69826 - protein, 17 aa, Homo sapiens
RPGPCSGGSCYYDFDYW

SEQ ID NO: 69827 - protein, 12 aa, Homo sapiens
CAREVCGGDCYP

SEQ ID NO: 69828 - protein, 11 aa, Homo sapiens
LSLLGGWFDPW

SEQ ID NO: 69829 - protein, 39 aa, Homo sapiens
FLMRCWNWFASILLRIFTSILFRDIGLKFSFSVVSLPGF

SEQ ID NO: 69830 - protein, 10 aa, Homo sapiens
SGSQSRFNYW

SEQ ID NO: 69831 - protein, 16 aa, Homo sapiens
CAKDPQRRYYYDSSGY

SEQ ID NO: 69832 - protein, 10 aa, Homo sapiens
YDYVGVFDYW

SEQ ID NO: 69833 - protein, 47 aa, Homo sapiens
CALPIWISFLMCCCIRFASISLRIFALMFIGHIGLKFSFFVLFMPGF

SEQ ID NO: 69834 - protein, 44 aa, Homo sapiens
CSSDLFLMCCGIQFASILLRIFTLKFIRDTGLMFSFFVLSLPGF

SEQ ID NO: 69835 - protein, 12 aa, Homo sapiens
SGYSLNNWFDPW

SEQ ID NO: 69836 - protein, 46 aa, Homo sapiens
CALPILNFLMCCQIQFAGILLRTFASMFIRGIDLKFSFFVMSLPGF

SEQ ID NO: 69837 - protein, 12 aa, Homo sapiens
LSTGWYTTFDYW

SEQ ID NO: 69838 - protein, 13 aa, Homo sapiens
ARGDGYYSPFDYW

SEQ ID NO: 69839 - protein, 17 aa, Homo sapiens
RSLGYCSSTSCFNFDYW

SEQ ID NO: 69840 - protein, 12 aa, Homo sapiens
WIQLWSSYFDYW

SEQ ID NO: 69841 - protein, 9 aa, Homo sapiens
GQNGAFDIW

SEQ ID NO: 69842 - protein, 14 aa, Homo sapiens
CARGYCAAGSCYSV

SEQ ID NO: 69843 - protein, 10 aa, Homo sapiens
RAVAGHIDYW

SEQ ID NO: 69844 - protein, 17 aa, Homo sapiens
AASYCGGDCYSDAFDIW

SEQ ID NO: 69845 - protein, 44 aa, Homo sapiens
CALPIFLMCCCIRFASISLRIFALMFIGHIGLKFSFFVLFMPGF

SEQ ID NO: 69846 - protein, 18 aa, Homo sapiens
RSARGYCSSTSCYAFDIW

SEQ ID NO: 69847 - protein, 10 aa, Homo sapiens
SASSNGFDPW

SEQ ID NO: 69848 - protein, 10 aa, Homo sapiens
CYSTDSSGNH

SEQ ID NO: 69849 - protein, 14 aa, Homo sapiens
ARGYYDLSAGFDYW

SEQ ID NO: 69850 - protein, 15 aa, Homo sapiens
CAAAGDSGGYQKVTF

SEQ ID NO: 69851 - protein, 10 aa, Homo sapiens
GTSNTGKLIF

SEQ ID NO: 69852 - protein, 12 aa, Homo sapiens
CAANSGYSTLTF

SEQ ID NO: 69853 - protein, 12 aa, Homo sapiens
AARSGNTGKLIF

SEQ ID NO: 69854 - protein, 10 aa, Homo sapiens
CQSADSDATY

SEQ ID NO: 69855 - protein, 14 aa, Homo sapiens
CAGDGYSSASKIIF

SEQ ID NO: 69856 - protein, 11 aa, Homo sapiens
CMQATHWPALS

SEQ ID NO: 69857 - protein, 11 aa, Homo sapiens
CAAWDNSLSGR

SEQ ID NO: 69858 - protein, 43 aa, Homo sapiens
CSSDLYQHRTMQAHELFRYFRMPELVDFRQYVRTLPTNTLMGF

SEQ ID NO: 69859 - protein, 46 aa, Homo sapiens
CALPILENYQHRTMQAHELFRYFRMPELVDFRQYVRTLPTNTLMGF

SEQ ID NO: 69860 - protein, 14 aa, Homo sapiens
CALPGYSSASKIIF

SEQ ID NO: 69861 - protein, 13 aa, Homo sapiens
CAVGGSSASKIIF

SEQ ID NO: 69862 - protein, 43 aa, Homo sapiens
CALPIYQHRTMQAHELFRYFRMPELVDFRQYVRTLPTNTLMGF

SEQ ID NO: 69863 - protein, 13 aa, Homo sapiens
CAVAYSSASKIIF

SEQ ID NO: 69864 - protein, 15 aa, Homo sapiens
CAASSGSGNTGKLIF

SEQ ID NO: 69865 - protein, 11 aa, Homo sapiens
CGTWDSSLTPG

SEQ ID NO: 69866 - protein, 45 aa, Homo sapiens
CDSSVTERNPSWHSAPALRAFVSRLCMRVTRARAPSFPRAKEDGF

SEQ ID NO: 69867 - protein, 44 aa, Homo sapiens
CALPICKLCNVTEHIESVVIVVLLSSLSPVSCYTYSVPNCKLNF

SEQ ID NO: 69868 - protein, 43 aa, Homo sapiens
CALPIWNPSWHSAPALRAFVSRLCMRVTRARAPSFPRAKEDGF

SEQ ID NO: 69869 - protein, 45 aa, Homo sapiens
CALPISERNPSWHSAPALRAFVSRLCMRVTRARAPSFPRAKEDGF

SEQ ID NO: 69870 - protein, 13 aa, Homo sapiens
CAATYSSASKIIF

SEQ ID NO: 69871 - protein, 44 aa, Homo sapiens
CSSDLQTSSLESCIYMWLDKYLKEKNTKRDSPHSLPPPTIFFNF

SEQ ID NO: 69872 - protein, 46 aa, Homo sapiens
CSSDLLEGASLPHPEGGPAHHPLLPGVSQPPSPRGEKLVGEGWLGF

SEQ ID NO: 69873 - protein, 44 aa, Homo sapiens
CSSDLGASLPHPEGGPAHHPLLPGVSQPPSPRGEKLVGEGWLGF

SEQ ID NO: 69874 - protein, 48 aa, Homo sapiens
CALPIWSLEGASLPHPEGGPAHHPLLPGVSQPPSPRGEKLVGEGWLGF

SEQ ID NO: 69875 - protein, 12 aa, Homo sapiens
CVVRDTGNQFYF

SEQ ID NO: 69876 - protein, 15 aa, Homo sapiens
CAVSDLYSSASKIIF

SEQ ID NO: 69877 - protein, 14 aa, Homo sapiens
CAVSFYSSASKIIF

SEQ ID NO: 69878 - protein, 14 aa, Homo sapiens
CAVRGDSSASKIIF

SEQ ID NO: 69879 - protein, 44 aa, Homo sapiens
CSSDLWASLFNQTVFLGLQGPLTPDGHRVPPADHRAWLSPEGGF

SEQ ID NO: 69880 - protein, 38 aa, Homo sapiens
PCKARLCKVSPLQTEWFKTARMHSSIYNSKAPCTELGF

SEQ ID NO: 69881 - protein, 44 aa, Homo sapiens
CALPISRIPTSARGPWWFCGVSGSVLRVGRATKLVLPSSFQFVF

SEQ ID NO: 69882 - protein, 47 aa, Homo sapiens
CALPISGMEQNRKDPPGPATTSLAPVRGGTLCIGPGSSSCRQRPRGF

SEQ ID NO: 69883 - protein, 43 aa, Homo sapiens
CSSDLQNRKDPPGPATTSLAPVRGGTLCIGPGSSSCRQRPRGF

SEQ ID NO: 69884 - protein, 44 aa, Homo sapiens
CSSDLSRIPTSARGPWWFCGVSGSVLRVGRATKLVLPSSFQFVF

SEQ ID NO: 69885 - protein, 46 aa, Homo sapiens
CALPIWMEQNRKDPPGPETTSLAPVRGGTLCIGPGSSSCRQRPRGF

SEQ ID NO: 69886 - protein, 47 aa, Homo sapiens
CALPISGMEQNRKDPPGPETTSLAPVRGGTLCIGPGSSSCRQRPRGF

SEQ ID NO: 69887 - protein, 40 aa, Homo sapiens
MEQNRKDPPGPATTSLAPVRGGTLCIGPGSSSCRQRPRGF

SEQ ID NO: 69888 - protein, 12 aa, Homo sapiens
CYLTDSSINHRV

SEQ ID NO: 69889 - protein, 43 aa, Homo sapiens
CALPICVGLSLLPVPSHLVHEPRSWSLVLEAAVMSGTGICLAF

SEQ ID NO: 69890 - protein, 47 aa, Homo sapiens
CALPISPAYIIMSFSLITHFTANETQARRTERWPSSHRNRTSWDSCF

SEQ ID NO: 69891 - protein, 44 aa, Homo sapiens
CLLKTTVLSFMQCFCTETAVSCQCTVNGRKTNKMSFQVFLRDGF

SEQ ID NO: 69892 - protein, 45 aa, Homo sapiens
CALPISGFYYTGLYSEIFFIILLTIDRYLAIVHAVFALRARTVTF

SEQ ID NO: 69893 - protein, 14 aa, Homo sapiens
CAASYSSNTGKLIF

SEQ ID NO: 69894 - protein, 46 aa, Homo sapiens
CALPIWGLGVGLSLLPVPSHLVHEPRSWSIVLEAAVMSGTGICLAF

SEQ ID NO: 69895 - protein, 44 aa, Homo sapiens
CALPILGVGLSLLPVPSHLVHEPRSWSLVLEAAVMSGTGICLAF

SEQ ID NO: 69896 - protein, 45 aa, Homo sapiens
CALPICLGVGLSLLPVPSHLVHEPRSWSLVLEAAVMSGTGICLAF

SEQ ID NO: 69897 - protein, 44 aa, Homo sapiens
CALPIYIIMSFSLITHFTANETQARRTERWPSSHRNRTSWDSCF

SEQ ID NO: 69898 - protein, 45 aa, Homo sapiens
CALPISYIIMSFSLITHFTANETQARRTERWPSSHRNRTSWDSCF

SEQ ID NO: 69899 - protein, 45 aa, Homo sapiens
CALPIAYIIMSFSLITHFTANETQARRTERWPSSHRNRTSWDSCF
